(19) United States
(12) Patent Application Publication
(10) Pub. No.: US 2024/0026011 A1
(43) Pub. Date: Jan. 25, 2024

(54) CONSTRAINED CONDITIONALLY ACTIVATED BINDING PROTEINS

(71) Applicant: Takeda Pharmaceutical Company Limited, Osaka (JP)

(72) Inventors: Robert B. DuBridge, Belmont, CA (US); Tseng-hui Timothy Chen, Burlingame, CA (US); Patricia Culp, Oakland, CA (US); Chad Michael May, San Carlos, CA (US); Danielle Dettling, San Francisco, CA (US); Jeremiah Degenhardt, El Granada, CA (US)

(73) Assignee: Takeda Pharmaceutical Company Limited, Osaka (JP)

(21) Appl. No.: 18/021,730

(22) PCT Filed: Aug. 17, 2021
(86) PCT No.: PCT/US2021/046217

§ 371 Date: Feb. 16, 2023

Related U.S. Application Data
(60) Provisional application No. 63/066,565, filed on Aug. 17, 2020.

(51) Int. Cl. C07K 16/28; C07K 16/30; A61P 35/00; C07K 16/32

(52) U.S. Cl. CPC C07K 16/2863; C07K 16/30; A61P 35/00; C07K 16/28; C07K 16/32; C07K 16/2827; C07K 2317/732; C07K 2317/31; C07K 2317/569; C07K 2317/24; C07K 2317/92; C07K 2319/50; A61K 2039/505

(57) ABSTRACT

The invention relates to Conditional Bispecific Redirected Activation constructs, or COBRAs, that are administered in an active pro-drug format. Upon exposure to tumor proteases, the constructs are cleaved and activated, such that they can bind one or more tumor target antigens (TTAs) as well as CD3, thus recruiting T cells expressing CD3 to the tumor, resulting in treatment. In some embodiments, the tumor target antigen includes B7H3, CA9 (CAIX), EGFR, EpCAM, FOLR1, HER2, LyPD3, and/or Trop2.

### CROSS REFERENCE TO RELATED APPLICATIONS

[0001] This application claims priority to U.S. Provisional Application No. 63/066,565 filed Aug. 17, 2020, the disclosure of which is herein incorporated by reference in its entirety.

### SEQUENCE LISTING

[0002] The instant application contains a Sequence Listing which has been submitted electronically in ASCII format and is hereby incorporated by reference in its entirety. Said ASCII copy, created on Aug. 13, 2021, is named 118459-5014-WO_SL.txt and is 1,341,889 bytes in size.

### BACKGROUND OF THE INVENTION

[0003] The selective destruction of an individual cell or a specific cell type is often desirable in a variety of clinical settings. For example, it is a primary goal of cancer therapy to specifically destroy tumor cells, while leaving healthy cells and tissues as intact and undamaged as possible. One such method is by inducing an immune response against the tumor, to make immune effector cells such as natural killer (NK) cells or cytotoxic T lymphocytes (CTLs) attack and destroy tumor cells.

[0004] The use of intact monoclonal antibodies (mAb), which provide superior binding specificity and affinity for a tumor-associated antigen, have been successfully applied in the area of cancer treatment and diagnosis. However, the large size of intact mAbs, their poor bio-distribution, low potency and long persistence in the blood pool have limited their clinical applications. For example, intact antibodies can exhibit specific accumulation within the tumor area. In biodistribution studies, an inhomogeneous antibody distribution with primary accumulation in the peripheral regions is noted when precisely investigating the tumor. Due to tumor necrosis, inhomogeneous antigen distribution and increased interstitial tissue pressure, it is not possible to reach central portions of the tumor with intact antibody constructs. In contrast, smaller antibody fragments show rapid tumor localization, penetrate deeper into the tumor, and also, are removed relatively rapidly from the bloodstream. However, many antibodies, including scFvs and other constructs, show “on target/off tumor” effects, wherein the molecule is active on non-tumor cells, causing side effects, some of which can be toxic. The present invention is related to novel constructs that are selectively activated in the presence of tumor proteases.

### SUMMARY OF THE INVENTION

[0005] In one aspect, provided is a fusion protein comprising, from N- to C-terminal: (a) a first sdABD that binds HER2 (sdABD-HER2); (b) a first domain linker; (c) a constrained Fv domain comprising: (i) a first variable heavy domain comprising a vhCDR1, vhCDR2 and vhCDR3; (ii) a constrained non-cleavable linker (CNCL); and (iii) a first variable light domain comprising vlCDR1, vlCDR2 and vlCDR3; (d) a second domain linker; (e) a second sdABD-HER2; (f) a cleavable linker (CL); (g) a constrained pseudo Fv domain comprising: (i) a first pseudo variable light domain; (ii) a non-cleavable linker (NCL); and (iii) a first pseudo variable heavy domain; (h) a third domain linker; and (i) a third sdABD that binds to human serum albumin (sdABD-HSA); wherein the first variable heavy domain and the first variable light domain of the constrained Fv domain are capable of binding human CD3 but the constrained pseudo Fv domain does not bind CD3; the first variable heavy domain and the first pseudo variable light domain intramolecularly associate to form an inactive Fv; and the first variable light domain and the first pseudo variable heavy domain intramolecularly associate to form an inactive Fv.

[0006] In some embodiments, the first and/or second sdABD-HER2 has an amino acid sequence comprising a set of CDRs selected from the group consisting of: (a) a sdCDR1 of SEQ ID NO:194 a sdCDR2 of SEQ ID NO: 195 and a sdCDR3 of SEQ ID NO:196; (b) a sdCDR1 of SEQ ID NO:218, a sdCDR2 of SEQ ID NO:219 and a sdCDR3 of SEQ ID NO:220; (c) a sdCDR1 of SEQ ID NO:226, a sdCDR2 of SEQ ID NO:227 and a sdCDR3 of SEQ ID NO:228; (d) a sdCDR1 of SEQ ID NO:238, a sdCDR2 of SEQ ID NO:239 and a sdCDR3 of SEQ ID NO:240; (e) a sdCDR1 of SEQ ID NO:142, a sdCDR2 of SEQ ID NO:143 and a sdCDR3 of SEQ ID NO:144; (f) a sdCDR1 of SEQ ID NO146, a sdCDR2 of SEQ ID NO:147 and a sdCDR3 of SEQ ID NO: 148; (g) a sdCDR1 of SEQ ID NO:150, a sdCDR2 of SEQ ID NO:151 and a sdCDR3 of SEQ ID NO:152; (h) a sdCDR1 of SEQ ID NO:154, a sdCDR2 of SEQ ID NO:155, and a sdCDR3 of SEQ ID NO:156; (i) a sdCDR1 of SEQ ID NO:158, a sdCDR2 of SEQ ID NO:159, and a sdCDR3 of SEQ ID NO:160; (j) a sdCDR1 of SEQ ID NO:162, a sdCDR2 of SEQ ID NO:163, and a sdCDR3 of SEQ ID NO:164; (k) a sdCDR1 of SEQ ID NO:166, a sdCDR2 of SEQ ID NO:167, and a sdCDR3 of SEQ ID NO: 168; (1) a sdCDR1 of SEQ ID NO:170, a sdCDR2 of SEQ ID NO:171, and a sdCDR3 of SEQ ID NO:172; (m) a sdCDR1 of SEQ ID NO:174, a sdCDR2 of SEQ ID NO:175, and a sdCDR3 of SEQ ID NO:176; (n) a sdCDR1 of SEQ ID NO:178, a sdCDR2 of SEQ ID NO:179, and a sdCDR3 of SEQ ID NO: 180; (o) a sdCDR1 of SEQ ID NO:182, a sdCDR2 of SEQ ID NO:183, and a sdCDR3 of SEQ ID NO:184; (p) a sdCDR1 of SEQ ID NO:186, a sdCDR2 of SEQ ID NO:187, and a sdCDR3 of SEQ ID NO:188; (q) a sdCDR1 of SEQ ID NO:190, a sdCDR2 of SEQ ID NO:191, and a sdCDR3 of SEQ ID NO:192; (r) a sdCDR1 of SEQ ID NO:194, a sdCDR2 of SEQ ID NO:195, and a sdCDR3 of SEQ ID NO:196; (s) a sdCDR1 of SEQ ID NO:198, a sdCDR2 of SEQ ID NO:199, and a sdCDR3 of SEQ ID NO:200; (t) a sdCDR1 of SEQ ID NO:202, a sdCDR2 of SEQ ID NO:203, and a sdCDR3 of SEQ ID NO:204; (u) a sdCDR1 of SEQ ID NO:206, a sdCDR2 of SEQ ID NO:207, and a sdCDR3 of SEQ ID NO:203; (v) a sdCDR1 of SEQ ID NO:210, a sdCDR2 of SEQ ID NO:211, and a sdCDR3 of SEQ ID NO:212; (w) a sdCDR1 of SEQ ID NO:214, a sdCDR2 of SEQ ID NO:215, and a sdCDR3 of SEQ ID NO:216; (x) a sdCDR1 of SEQ ID NO:218, a sdCDR2 of SEQ ID NO:219, and a sdCDR3 of SEQ ID NO:220; (y) a sdCDR1 of SEQ ID NO:222, a sdCDR2 of SEQ ID NO:223, and a sdCDR3 of SEQ ID NO:224; (z) a sdCDR1 of SEQ ID NO:226, a sdCDR2 of SEQ ID NO:227, and a sdCDR3 of SEQ ID NO:228; (aa) a sdCDR1 of SEQ ID NO:230, a sdCDR2 of SEQ ID NO:231, and a sdCDR3 of SEQ ID NO:232; (ab) a sdCDR1 of SEQ ID NO:234, a sdCDR2 of SEQ ID NO:235, and a sdCDR3 of SEQ ID NO:236; (ac) a sdCDR1 of SEQ ID NO:238, a sdCDR2 of SEQ ID NO:239, and a sdCDR3 of SEQ ID NO:240; (ad) a sdCDR1 of SEQ ID NO:242, a sdCDR2 of SEQ ID NO:243, and a sdCDR3 with SEQ ID NO:244; and (ae) a sdCDR1 of SEQ ID NO:500, a sdCDR2 of SEQ ID NO:501, and a sdCDR3 with SEQ ID NO:502; (af) a sdCDR1 of SEQ ID NO:504, a sdCDR2 of SEQ ID NO:505, and a sdCDR3 with SEQ ID NO:506; (ag) a sdCDR1 of SEQ ID NO:508, a sdCDR2 of SEQ ID NO:509, and a sdCDR3 with SEQ ID NO:510; and (ah) a sdCDR1 of SEQ ID NO:512, a sdCDR2 of SEQ ID NO:513, and a sdCDR3 with SEQ ID NO:5.

[0007] In some embodiments, the first and/or second sdABD-HER2 comprises an amino acid sequence selected from the group consisting of SEQ ID NO: 193, SEQ ID NO:217, SEQ ID NO:225, SEQ ID NO:237, SEQ ID NO:141, SEQ ID NO:145, SEQ ID NO:149, SEQ ID NO:153, SEQ ID NO:157, SEQ ID NO:161, SEQ ID NO:165, SEQ ID NO:169, SEQ ID NO:173, SEQ ID NO:177, SEQ ID NO:181, SEQ ID NO:185, SEQ ID NO:189, SEQ ID NO:197, SEQ ID NO:201, SEQ ID NO:205, SEQ ID NO:209, SEQ ID NO:213, SEQ ID NO:221, SEQ ID NO:229, SEQ ID NO:233, SEQ ID NO:241, SEQ ID NO:499, SEQ ID NO:503, SEQ ID NO:507, and SEQ ID NO:511.

[0008] In some embodiments, the first sdABD-HER2 and the second sdABD-HER2 are the same.

[0009] In some embodiments, the first sdABD-HER2 and the second sdABD-HER2 are different.

[0010] In some embodiments, the first variable heavy domain is N-terminal to the first variable light domain and the pseudo variable light domain is N-terminal to the pseudo variable heavy domain.

[0011] In some embodiments, the first variable heavy domain is N-terminal to the first variable light domain and the pseudo variable heavy domain is N-terminal to the pseudo variable light domain.

[0012] In some embodiments, the first variable light domain is N-terminal to the first variable heavy domain and the pseudo variable light domain is N-terminal to the pseudo variable heavy domain.

[0013] In some embodiments, the first variable light domain is N-terminal to the first variable heavy domain and the pseudo variable heavy domain is N-terminal to the pseudo variable light domain.

[0014] In some embodiments, the third sdABD that binds to HSA (sdABD-HSA) has an amino acid sequence comprising: (a) a set of CDRs selected from the group consisting of (i) a sdCDR1 of SEQ ID NO:246, a sdCDR2 of SEQ ID NO:247, and a sdCDR3 of SEQ ID NO:248, and (ii) a sdCDR1 of SEQ ID NO:250, a sdCDR2 of SEQ ID NO:251, and a sdCDR3 of SEQ ID NO:252; or (b) an amino acid sequence selected from the group consisting of SEQ ID NO:245 and SEQ ID NO:249.

[0015] In some embodiments, the cleavable linker comprises a cleavage domain sequence selected from the group consisting of SEQ ID NOS:339-408 and 532-535.

[0016] In some embodiments, the cleavable linker is cleaved by a human protease selected from the group consisting of MMP2, MMP9, meprin A, meprin B, cathepsin S, capthepsin K, capthesin L, granzyme B, uPA, kallekriein7, matriptase, and thrombin.

[0017] In some embodiments, the fusion protein has an amino acid sequence selected from group consisting of SEQ ID NOS:459-484 and 491-494.

[0018] Provided herein is a nucleic acid encoding any of the fusion proteins described.

[0019] Provided herein is an expression vector comprising any of the nucleic acids described.

[0020] Provided herein is a host cell comprising any of the expression vectors described

[0021] In some aspects, provided is a method of making a fusion protein of the present disclosure comprising: (i) culturing the host cell described under conditions wherein the fusion protein is expressed and (ii) recovering the fusion protein.

[0022] In some aspects, provided is a method of treating cancer in a subject comprising administering any of the fusion proteins described to the subject.

[0023] In some aspects, provided is a single domain antigen binding domain (sdABD) that binds human HER2 (sdABD-HER2) comprising (i) an amino acid sequence selected from the group consisting of SEQ ID NO:141, SEQ ID NO:145, SEQ ID NO:149, SEQ ID NO:153, SEQ ID NO:157, SEQ ID NO:161, SEQ ID NO:165, SEQ ID NO:169, SEQ ID NO: 173, SEQ ID NO:177, SEQ ID NO:181, SEQ ID NO:185, SEQ ID NO:189, SEQ ID NO: 193, SEQ ID NO:197, SEQ ID NO:201, SEQ ID NO:205, SEQ ID NO:209, SEQ ID NO:213, SEQ ID NO:217, SEQ ID NO:221, SEQ ID NO:225, SEQ ID NO:229, SEQ ID NO:233, SEQ ID NO:237, SEQ ID NO:241, SEQ ID NO:499, SEQ ID NO:503, SEQ ID NO:507, and SEQ ID NO:511; or (ii) an amino acid sequence comprising a set of CDRs selected from the group consisting of: (a) a sdCDR1 of SEQ ID NO:194 a sdCDR2 of SEQ ID NO:195 and a sdCDR3 of SEQ ID NO:196; (b) a sdCDR1 of SEQ ID NO:218, a sdCDR2 of SEQ ID NO:219 and a sdCDR3 of SEQ ID NO:220; (c) a sdCDR1 of SEQ ID NO:226, a sdCDR2 of SEQ ID NO:227 and a sdCDR3 of SEQ ID NO:228; (d) a sdCDR1 of SEQ ID NO:238, a sdCDR2 of SEQ ID NO:239 and a sdCDR3 of SEQ ID NO:240; (e) a sdCDR1 of SEQ ID NO:142, a sdCDR2 of SEQ ID NO:143 and a sdCDR3 of SEQ ID NO:144; (f) a sdCDR1 of SEQ ID NO146, a sdCDR2 of SEQ ID NO:147 and a sdCDR3 of SEQ ID NO:148; (g) a sdCDR1 of SEQ ID NO:150, a sdCDR2 of SEQ ID NO:151 and a sdCDR3 of SEQ ID NO:152; (h) a sdCDR1 of SEQ ID NO:154, a sdCDR2 of SEQ ID NO:155, and a sdCDR3 of SEQ ID NO:156; (i) a sdCDR1 of SEQ ID NO:158, a sdCDR2 of SEQ ID NO:159, and a sdCDR3 of SEQ ID NO: 160; (j) a sdCDR1 of SEQ ID NO:162, a sdCDR2 of SEQ ID NO:163, and a sdCDR3 of SEQ ID NO:164; k) a sdCDR1 of SEQ ID NO:166, a sdCDR2 of SEQ ID NO:167, and a sdCDR3 of SEQ ID NO:168; (1) a sdCDR1 of SEQ ID NO:170, a sdCDR2 of SEQ ID NO:171, and a sdCDR3 of SEQ ID NO:172; (m) a sdCDR1 of SEQ ID NO:174, a sdCDR2 of SEQ ID NO:175, and a sdCDR3 of SEQ ID NO:176; (n) a sdCDR1 of SEQ ID NO:178, a sdCDR2 of SEQ ID NO:179, and a sdCDR3 of SEQ ID NO:180; (o) a sdCDR1 of SEQ ID NO:182, a sdCDR2 of SEQ ID NO:183, and a sdCDR3 of SEQ ID NO: 184; (p) a sdCDR1 of SEQ ID NO:186, a sdCDR2 of SEQ ID NO:187, and a sdCDR3 of SEQ ID NO:188; (q) a sdCDR1 of SEQ ID NO:190, a sdCDR2 of SEQ ID NO:191, and a sdCDR3 of SEQ ID NO:192; (r) a sdCDR1 of SEQ ID NO:194, a sdCDR2 of SEQ ID NO:195, and a sdCDR3 of SEQ ID NO:196; (s) a sdCDR1 of SEQ ID NO:198, a sdCDR2 of SEQ ID NO:199, and a sdCDR3 of SEQ ID NO:200; (t) a sdCDR1 of SEQ ID NO:202, a sdCDR2 of SEQ ID NO:203, and a sdCDR3 of SEQ ID NO:204; (u) a sdCDR1 of SEQ ID NO:206, a sdCDR2 of SEQ ID NO:207, and a sdCDR3 of SEQ ID NO:203; (v) a sdCDR1 of SEQ ID NO:210, a sdCDR2 of SEQ ID NO:211, and a sdCDR3 of SEQ ID NO:212; (w) a sdCDR1 of SEQ ID NO:214, a sdCDR2 of SEQ ID NO:215, and a sdCDR3 of SEQ ID NO:216; (x) a sdCDR1 of SEQ ID NO:218, a sdCDR2 of SEQ ID NO:219, and a sdCDR3 of SEQ ID NO:220; (y) a sdCDR1 of SEQ ID NO:222, a sdCDR2 of SEQ ID NO:223, and a sdCDR3 of SEQ ID NO:224; (z) a sdCDR1 of SEQ ID NO:226, a sdCDR2 of SEQ ID NO:227, and a sdCDR3 of SEQ ID NO:228; aa) a sdCDR1 of SEQ ID NO:230, a sdCDR2 of SEQ ID NO:231, and a sdCDR3 of SEQ ID NO:232; ab) a sdCDR1 of SEQ ID NO:234, a sdCDR2 of SEQ ID NO:235, and a sdCDR3 of SEQ ID NO:236; ac) a sdCDR1 of SEQ ID NO:238, a sdCDR2 of SEQ ID NO:239, and a sdCDR3 of SEQ ID NO:240; ad) a sdCDR1 of SEQ ID NO:242, a sdCDR2 of SEQ ID NO:243, and a sdCDR3 with SEQ ID NO:244; ae) a sdCDR1 of SEQ ID NO:500, a sdCDR2 of SEQ ID NO:501, and a sdCDR3 with SEQ ID NO:502; af) a sdCDR1 of SEQ ID NO:504, a sdCDR2 of SEQ ID NO:505, and a sdCDR3 with SEQ ID NO:506; ag) a sdCDR1 of SEQ ID NO:508, a sdCDR2 of SEQ ID NO:509, and a sdCDR3 with SEQ ID NO:510; and ah) a sdCDR1 of SEQ ID NO:512, a sdCDR2 of SEQ ID NO:513, and a sdCDR3 with SEQ ID NO:514.

[0024] In some aspects, provided is a fusion protein comprising, from N- to C-terminal: (a) a first sdABD that binds a tumor target antigen (sdABD-TTA); (b) a first domain linker; (c) a constrained Fv domain comprising: (i) a first variable heavy domain comprising a vhCDR1, vhCDR2 and vhCDR3; (ii) a constrained non-cleavable linker (CNCL); and (iii) a first variable light domain comprising vlCDR1, vlCDR2 and vlCDR3; d) a second domain linker; e) a second sdABD-TTA; f) a cleavable linker (CL); (g) a constrained pseudo Fv domain comprising: (i) a first pseudo variable light domain; (ii) a non-cleavable linker (NCL); and (iii) a first pseudo variable heavy domain; (h) a third domain linker; and (i) a third sdABD that binds to human serum albumin (sdABD-HSA); wherein the first variable heavy domain and the first variable light domain of the constrained Fv domain are capable of binding human CD3 but the constrained pseudo Fv domain does not bind CD3; the first variable heavy domain and the first pseudo variable light domain intramolecularly associate to form an inactive Fv; the first variable light domain and the first pseudo variable heavy domain intramolecularly associate to form an inactive Fv and wherein either (1) the first sdABD-TTA is a sdABD-HER2 or a sdABD-LyPD3, and the second sdABD-TTA is selected from the group consisting of a sdABD-B7H3, a sdABD-CA9, a sdABD-EGFR, a sdABD-EpCAM, a sdABD-FOLR1, a sdABD-HER2, a sdABD-LyPD3 and a sdABD-Trop2; or (2) the first sdABD-TTA is selected from the group consisting of a sdABD-B7H3, a sdABD-CA9, a sdABD-EGFR, a sdABD-EpCAM, a sdABD-FOLR1, a sdABD-HER2, a sdABD-LyPD3 and a sdABD-Trop2, and the second sdABD-TTA is a sdABD-HER2 or a sdABD-LyPD3.

[0025] In some embodiments, the first and second sdABD-TTA are each a sdABD-LyPD3. In some embodiments, the first and second sdABD-LPYD3 are the same. In some embodiments, the first and second sdABD-LPYD3 are different.

[0026] In some embodiments of the fusion protein, (a) the first sdABD-TTA is a sdABD-HER2 and the second sdABD-TTA is selected from the group consisting of a sdABD-B7H3, a sdABD-CA9, a sdABD-EGFR, a sdABD-EpCAM, a sdABD-FOLR1, a sdABD-LyPD3, and a sdABD-Trop2; (b) the first sdABD-TTA is a sdABD-LyPD3 and the second sdABD-TTA is selected from the group consisting a sdABD-B7H3, a sdABD-CA9, a sdABD-EGFR, a sdABD-EpCAM, a sdABD-FOLR1, a sdABD-HER2, and a sdABD-Trop2; (c) the first sdABD-TTA is selected from the group consisting a sdABD-B7H3, a sdABD-CA9, a sdABD-EGFR, a sdABD-EpCAM, a sdABD-FOLR1, a sdABD-LyPD3, and a sdABD-Trop2 and the second TTA is a sdABD-HER2; or (d) the first sdABD-TTA is selected from the group consisting a sdABD-B7H3, a sdABD-CA9, a sdABD-EGFR, a sdABD-EpCAM, a sdABD-FOLR1, a sdABD-LyPD3, and a sdABD-Trop2 and the second TTA is a sdABD-LyPD3.

[0027] In some embodiments, the sdABD-HER2 comprises an amino acid sequence selected from the group consisting of: (a) a set of CDRs comprising a sdCDR1 of SEQ ID NO:194 a sdCDR2 of SEQ ID NO:195 and a sdCDR3 of SEQ ID NO:196; (b) a set of CDRs comprising a sdCDR1 of SEQ ID NO:218, a sdCDR2 of SEQ ID NO:219 and a sdCDR3 of SEQ ID NO:220; (c) a set of CDRs comprising a sdCDR1 of SEQ ID NO:226, a sdCDR2 of SEQ ID NO:227 and a sdCDR3 of SEQ ID NO:228; (d) a set of CDRs comprising a sdCDR1 of SEQ ID NO:238, a sdCDR2 of SEQ ID NO:239 and a sdCDR3 of SEQ ID NO:240; (e) a set of CDRs comprising a sdCDR1 of SEQ ID NO: 142, a sdCDR2 of SEQ ID NO:143 and a sdCDR3 of SEQ ID NO:144; (f) a set of CDRs comprising a sdCDR1 of SEQ ID NO:146, a sdCDR2 of SEQ ID NO:147 and a sdCDR3 of SEQ ID NO:148; (g) a set of CDRs comprising a sdCDR1 of SEQ ID NO:150, a sdCDR2 of SEQ ID NO:151 and a sdCDR3 of SEQ ID NO:152; (h) a set of CDRs comprising a sdCDR1 of SEQ ID NO: 154, a sdCDR2 of SEQ ID NO:155, and a sdCDR3 of SEQ ID NO:156; (i) a set of CDRs comprising a sdCDR1 of SEQ ID NO:158, a sdCDR2 of SEQ ID NO:159, and a sdCDR3 of SEQ ID NO: 160; (j) a set of CDRs comprising a sdCDR1 of SEQ ID NO:162, a sdCDR2 of SEQ ID NO: 163, and a sdCDR3 of SEQ ID NO:164; (k) a set of CDRs comprising a sdCDR1 of SEQ ID NO:166, a sdCDR2 of SEQ ID NO:167, and a sdCDR3 of SEQ ID NO:168; (1) a set of CDRs comprising a sdCDR1 of SEQ ID NO: 170, a sdCDR2 of SEQ ID NO:171, and a sdCDR3 of SEQ ID NO:172; (m) a set of CDRs comprising a sdCDR1 of SEQ ID NO:174, a sdCDR2 of SEQ ID NO:175, and a sdCDR3 of SEQ ID NO:176; (n) a set of CDRs comprising a sdCDR1 of SEQ ID NO:178, a sdCDR2 of SEQ ID NO: 179, and a sdCDR3 of SEQ ID NO:180; (o) a set of CDRs comprising a sdCDR1 of SEQ ID NO:182, a sdCDR2 of SEQ ID NO: 183, and a sdCDR3 of SEQ ID NO:184; (p) a set of CDRs comprising a sdCDR1 of SEQ ID NO:186, a sdCDR2 of SEQ ID NO:187, and a sdCDR3 of SEQ ID NO:188; (q) a set of CDRs comprising a sdCDR1 of SEQ ID NO: 190, a sdCDR2 of SEQ ID NO:191, and a sdCDR3 of SEQ ID NO:192; (r) a set of CDRs comprising a sdCDR1 of SEQ ID NO:194, a sdCDR2 of SEQ ID NO:195, and a sdCDR3 of SEQ ID NO:196; (s) a set of CDRs comprising a sdCDR1 of SEQ ID NO: 198, a sdCDR2 of SEQ ID NO:199, and a sdCDR3 of SEQ ID NO:200; (t) a set of CDRs comprising a sdCDR1 of SEQ ID NO:202, a sdCDR2 of SEQ ID NO:203, and a sdCDR3 of SEQ ID NO:204; (u) a set of CDRs comprising a sdCDR1 of SEQ ID NO:206, a sdCDR2 of SEQ ID NO:207, and a sdCDR3 of SEQ ID NO:203; (v) a set of CDRs comprising a sdCDR1 of SEQ ID NO:210, a sdCDR2 of SEQ ID NO:211, and a sdCDR3 of SEQ ID NO:212; (w) a set of CDRs comprising a sdCDR1 of SEQ ID NO:214, a sdCDR2 of SEQ ID NO:215, and a sdCDR3 of SEQ ID NO:216; (x) a set of CDRs comprising a sdCDR1 of SEQ ID NO:218, a sdCDR2 of SEQ ID NO:219, and a sdCDR3 of SEQ ID NO:220; (y) a set of CDRs comprising a sdCDR1 of SEQ ID NO:222, a sdCDR2 of SEQ ID NO:223, and a sdCDR3 of SEQ ID NO:224; (z) a set of CDRs comprising a sdCDR1 of SEQ ID NO:226, a sdCDR2 of SEQ ID NO:227, and a sdCDR3 of SEQ ID NO:228; (aa) a set of CDRs comprising a sdCDR1 of SEQ ID NO:230, a sdCDR2 of SEQ ID NO:231, and a sdCDR3 of SEQ ID NO:232; (ab) a set of CDRs comprising a sdCDR1 of SEQ ID NO:234, a sdCDR2 of SEQ ID NO:235, and a sdCDR3 of SEQ ID NO:236; (ac) a set of CDRs comprising a sdCDR1 of SEQ ID NO:238, a sdCDR2 of SEQ ID NO:239, and a sdCDR3 of SEQ ID NO:240; and (ad) a set of CDRs comprising a sdCDR1 of SEQ ID NO:242, a sdCDR2 of SEQ ID NO:243, and a sdCDR3 with SEQ ID NO:244; (ae) SEQ ID NO:141; (af) SEQ ID NO: 145; (ag) SEQ ID NO:149; (ah) SEQ ID NO:153; (ai) SEQ ID NO:157; (aj) SEQ ID NO:161; (ak) SEQ ID NO:165; (al) SEQ ID NO:169; (am) SEQ ID NO:173; (an) SEQ ID NO:177; (ao) SEQ ID NO:181; (ap) SEQ ID NO:185; (aq) SEQ ID NO: 189; (ar) SEQ ID NO:193; (as) SEQ ID NO:197; (at) SEQ ID NO:201; (au) SEQ ID NO:205; (av) SEQ ID NO:209; (aw) SEQ ID NO:213; (ax) SEQ ID NO:217; (ay) SEQ ID NO:221; (az) SEQ ID NO:225; (ba) SEQ ID NO:229; (bb) SEQ ID NO:233; (bc) SEQ ID NO:237; and (bd) SEQ ID NO:241.

[0028] The fusion protein of any one of claims [00456]-[0027], wherein the sdABD-LyPD3 comprises an amino acid sequence selected from the group consisting of: (a) a set of CDRs comprising a sdCDR1 of SEQ ID NO: 118, a sdCDR2 of SEQ ID NO: 119 and a sdCDR3 of SEQ ID NO:120; (b) a set of CDRs comprising a sdCDR1 of SEQ ID NO: 122, a sdCDR2 of SEQ ID NO:123 and a sdCDR3 of SEQ ID NO:124; (c) a set of CDRs comprising a sdCDR1 of SEQ ID NO:126, a sdCDR2 of SEQ ID NO:127 and a sdCDR3 of SEQ ID NO:128; (d) a set of CDRs comprising a sdCDR1 of SEQ ID NO:130, a sdCDR2 of SEQ ID NO:131, and a sdCDR3 of SEQ ID NO:132; (e) a set of CDRs comprising a sdCDR1 of SEQ ID NO:134, a sdCDR2 of SEQ ID NO:135, and a sdCDR3 of SEQ ID NO:136; (f) a set of CDRs comprising a sdCDR1 of SEQ ID NO: 138, a sdCDR2 of SEQ ID NO:139, and a sdCDR3 of SEQ ID NO:140; (g) SEQ ID NO:117; (h) SEQ ID NO:121; (i) SEQ ID NO:125; (j) SEQ ID NO: 129; (k) SEQ ID NO:133; and (l) SEQ ID NO: 137.

[0029] In some embodiments, the sdABD-B7H3 comprises an amino acid sequence selected from the group consisting of: (i) a set of CDRs comprising a sdCDR1 of SEQ ID NO:34 a sdCDR2 of SEQ ID NO:35 and a sdCDR3 of SEQ ID NO:36; (ii) a set of CDRs comprising a sdCDR1 of SEQ ID NO:38, a sdCDR2 of SEQ ID NO:39 and a sdCDR3 of SEQ ID NO:40; (iii) a set of CDRs comprising a sdCDR1 of SEQ ID NO:42, a sdCDR2 of SEQ ID NO:43 and a sdCDR3 of SEQ ID NO:44; (iv) a set of CDRs comprising a sdCDR1 of SEQ ID NO:46, a sdCDR2 of SEQ ID NO:47 and a sdCDR3 of SEQ ID NO:48; (v) a set of CDRs comprising a sdCDR1 of SEQ ID NO:50, a sdCDR2 of SEQ ID NO: 51 and a sdCDR3 of SEQ ID NO:52; (vi) a set of CDRs comprising a sdCDR1 of SEQ ID NO:54, a sdCDR2 of SEQ ID NO:55 and a sdCDR3 of SEQ ID NO:56; (vii) a set of CDRs comprising a sdCDR1 of SEQ ID NO:58, a sdCDR2 of SEQ ID NO:59 and a sdCDR3 of SEQ ID NO:60; (ix) SEQ ID NO:33; (x) SEQ ID NO:37; (xi) SEQ ID NO:41; (xii) SEQ ID NO:45; (xiii) SEQ ID NO:49; (xiv) SEQ ID NO:53; and (xv) SEQ ID NO:57.

[0030] In some embodiments, the sdABD-CA9 comprises an amino acid sequence selected from the group consisting of: (i) a set of CDRs comprising a sdCDR1 of SEQ ID NO:102, a sdCDR2 of SEQ ID NO:103 and a sdCDR3 of SEQ ID NO:104; (ii) a set of CDRs comprising a sdCDR1 of SEQ ID NO: 106, a sdCDR2 of SEQ ID NO:107 and a sdCDR3 of SEQ ID NO:108; (iii) a set of CDRs comprising a sdCDR1 of SEQ ID NO:110, a sdCDR2 of SEQ ID NO:111 and a sdCDR3 of SEQ ID NO:112; (iv) a set of CDRs comprising a sdCDR1 of SEQ ID NO:114, a sdCDR2 of SEQ ID NO: 115 and a sdCDR3 of SEQ ID NO: 116; (v) SEQ ID NO:101; (vi) SEQ ID NO: 105; (vii) SEQ ID NO: 109; and (viiii) SEQ ID NO: 113.

[0031] In some embodiments, the sdABD-EGFR comprises an amino acid sequence selected from the group consisting of: (i) a set of CDRs comprising a sdCDR1 of SEQ ID NO:2 a sdCDR2 of SEQ ID NO:3 and a sdCDR3 of SEQ ID NO:4; (ii) a set of CDRs comprising a sdCDR1 of SEQ ID NO:6, a sdCDR2 of SEQ ID NO:7 and a sdCDR3 of SEQ ID NO:8; (iii) a set of CDRs comprising a sdCDR1 of SEQ ID NO:10, a sdCDR2 of SEQ ID NO: 11 and a sdCDR3 of SEQ ID NO:12; (iv) a set of CDRs comprising a sdCDR1 of SEQ ID NO:14, a sdCDR2 of SEQ ID NO:15 and a sdCDR3 of SEQ ID NO:16; (v) a set of CDRs comprising a sdCDR1 of SEQ ID NO: 18, a sdCDR2 of SEQ ID NO:19 and a sdCDR3 of SEQ ID NO:20; (vi) SEQ ID NO: 1; (vii) SEQ ID NO: 5; (viii) SEQ ID NO:9; (ix) SEQ ID NO: 13; and (x) SEQ ID NO:17.

[0032] In some embodiments, the sdABD-EpCAM comprises an amino acid sequence selected from the group consisting of: (i) a set of CDRs comprising a sdCDR1 of SEQ ID NO:62 a sdCDR2 of SEQ ID NO:63 and a sdCDR3 of SEQ ID NO:64; (ii) a set of CDRs comprising a sdCDR1 of SEQ ID NO:66, a sdCDR2 of SEQ ID NO: 67 and a sdCDR3 of SEQ ID NO:68; (iii) a set of CDRs comprising a sdCDR1 of SEQ ID NO:70, a sdCDR2 of SEQ ID NO:71 and a sdCDR3 of SEQ ID NO:72; (iv) a set of CDRs comprising a sdCDR1 of SEQ ID NO:74, a sdCDR2 of SEQ ID NO:75 and a sdCDR3 of SEQ ID NO:76; (v) a set of CDRs comprising a sdCDR1 of SEQ ID NO:496, a sdCDR2 of SEQ ID NO:497 and a sdCDR3 of SEQ ID NO:498; (vi) SEQ ID NO: 61; (vii) SEQ ID NO: 65; (viii) SEQ ID NO:69; (ix) SEQ ID NO: 73; and (x) SEQ ID NO: 495.

[0033] In some embodiments, the sdABD-FOLR1 comprises an amino acid sequence selected from the group consisting of: (i) a set of CDRs comprising a sdCDR1 of SEQ ID NO:22 a sdCDR2 of SEQ ID NO:23 and a sdCDR3 of SEQ ID NO:24; (ii) a set of CDRs comprising a sdCDR1 of SEQ ID NO:26, a sdCDR2 of SEQ ID NO:27 and a sdCDR3 of SEQ ID NO:28; (iii) a set of CDRs comprising a sdCDR1 of SEQ ID NO:30, a sdCDR2 of SEQ ID NO:31 and a sdCDR3 of SEQ ID NO:32; (iv) SEQ ID NO:21; (v) SEQ ID NO:25; and (vi) SEQ ID NO:29.

[0034] In some embodiments, the sdABD-Trop2 comprises an amino acid sequence selected from the group consisting of: (i) a set of CDRs comprising a sdCDR1 of SEQ ID NO:78, a sdCDR2 of SEQ ID NO:79 and a sdCDR3 of SEQ ID NO:80; (ii) a set of CDRs comprising a sdCDR1 of SEQ ID NO:82, a sdCDR2 of SEQ ID NO:83 and a sdCDR3 of SEQ ID NO:84; (iii) a set of CDRs comprising a sdCDR1 of SEQ ID NO:86, a sdCDR2 of SEQ ID NO:87 and a sdCDR3 of SEQ ID NO:88; (iv) a set of CDRs comprising a sdCDR1 of SEQ ID NO:90, a sdCDR2 of SEQ ID NO:91, and a sdCDR3 of SEQ ID NO:92; (v) a set of CDRs comprising a sdCDR1 of SEQ ID NO:94, a sdCDR2 of SEQ ID NO:95, and a sdCDR3 of SEQ ID NO:96; (vi) a set of CDRs comprising a sdCDR1 of SEQ ID NO:98, a sdCDR2 of SEQ ID NO:99, and a sdCDR3 of SEQ ID NO:100; (vii) SEQ ID NO:77; (viii) SEQ ID NO: 81; (ix) SEQ ID NO:85; (x) SEQ ID NO: 89; (xi) SEQ ID NO: 93; and (xii) SEQ ID NO:97.

[0035] In some embodiments, the first variable heavy domain is N-terminal to the first variable light domain and the pseudo variable light domain is N-terminal to the pseudo variable heavy domain.

[0036] In some embodiments, the first variable heavy domain is N-terminal to the first variable light domain and the pseudo variable heavy domain is N-terminal to the pseudo variable light domain.

[0037] In some embodiments, the first variable light domain is N-terminal to the first variable heavy domain and the pseudo variable light domain is N-terminal to the pseudo variable heavy domain.

[0038] In some embodiments, the first variable light domain is N-terminal to the first variable heavy domain and the pseudo variable heavy domain is N-terminal to the pseudo variable light domain.

[0039] In some embodiments, the third sdABD that bind to HSA has an amino acid sequence comprising: (a) set of CDRs selected from the group consisting of (i) a sdCDR1 of SEQ ID NO:246, a sdCDR2 of SEQ ID NO:247, and a sdCDR3 of SEQ ID NO:248, and (ii) a sdCDR1 of SEQ ID NO:250, a sdCDR2 of SEQ ID NO:251, and a sdCDR3 of SEQ ID NO:252; or (b) an amino acid sequence selected from the group consisting of SEQ ID NO:245 and SEQ ID NO:249.

[0040] In some embodiments, the cleavable linker comprises a cleavage domain sequence selected from the group consisting of SEQ ID NOS:339-408 and 532-535.

[0041] In some embodiments, the cleavable linker is cleaved by a human protease selected from the group consisting of MMP2, MMP9, meprin A, meprin B, cathepsin S, capthepsin K, capthesin L, granzyme B, uPA, kallekriein7, matriptase, and thrombin.

[0042] In some embodiments, the fusion proteins comprises an amino acid sequence selected from the group consisting of SEQ ID NO:453, SEQ ID NO:454, SEQ ID NO:455, SEQ ID NO:456, SEQ ID NO:457, and SEQ ID NO:458.

[0043] Provided herein is a nucleic acid encoding any of the fusion proteins described. Provided herein is an expression vector comprising any of the nucleic acids described. Provided herein is a host cell comprising any of the expression vectors described

[0044] In some aspects, provided is a method of making a fusion protein of the present disclosure comprising: (i) culturing the host cell described under conditions wherein the fusion protein is expressed and (ii) recovering the fusion protein.

[0045] In some aspects, provided is a single domain antigen binding domain that binds human LyPD3 (sdABD-LyPD3) comprising (i) an amino acid sequence selected from the group consisting of SEQ ID NO:117, SEQ ID NO:121, SEQ ID NO:125, SEQ ID NO:129, SEQ ID NO:133 and, SEQ ID NO:137 or (ii) an amino acid sequence comprising a set of CDRs selected from the group consisting of: (a) a sdCDR1 of SEQ ID NO:118, a sdCDR2 of SEQ ID NO:119 and a sdCDR3 of SEQ ID NO: 120; (b) a sdCDR1 of SEQ ID NO:122, a sdCDR2 of SEQ ID NO:123 and a sdCDR3 of SEQ ID NO:124; (c) a sdCDR1 of SEQ ID NO:126, a sdCDR2 of SEQ ID NO:127 and a sdCDR3 of SEQ ID NO:128; (d) a sdCDR1 of SEQ ID NO:130, a sdCDR2 of SEQ ID NO:131, and a sdCDR3 of SEQ ID NO:132; (e) a sdCDR1 of SEQ ID NO:134, a sdCDR2 of SEQ ID NO:135, and a sdCDR3 of SEQ ID NO:136; and (f) a sdCDR1 of SEQ ID NO:138, a sdCDR2 of SEQ ID NO:139, and a sdCDR3 of SEQ ID NO:140.

[0046] Also provided is a nucleic acid encoding any of the single domain antigen binding domains (sdABDs) described. Also provided is an expression vector comprising any of the nucleic acids. Provided is a host cell comprising any of the expression vectors described.

[0047] In some aspects, provided is a method of making a single domain antigen binding domain (sdABD) comprising (a) culturing any of the host cells described herein under conditions wherein the sdABD is expressed and (b) recovering the sdABD.

[0048] Also provided is a pharmaceutical composition comprising any of the fusion proteins described or any of the single domain antigen binding domains (sdABDs) described.

[0049] In some embodiments, the pharmaceutical composition further comprises a pharmaceutically acceptable carrier or excipient.

[0050] In some aspects, provided is a method of treating cancer in a subject comprising administering any of the fusion proteins described, any of the single domain antigen binding domains (sdABDs) described, or any of the pharmaceutical compositions of the present disclosure.

### BRIEF DESCRIPTION OF THE DRAWINGS

[0051] FIG. 1 depicts the “format 1” type of protease activation of the present invention, referred to herein as “constrained, cleavable constructs” or “cc constructs”. In this embodiment, a representative construct includes ABDs for two TTA (as depicted in FIG. 1, these are both the same, although as described herein they can be different). Upon cleavage, the prodrug construct splits into three components, one containing an α-TTA domain linked via a domain linker to an active VH of αCD3, the second containing an α-TTA domain linked via a domain linker to an active VL of αCD3, and a “leftover” piece comprising the half-life extension domain linked to the inactive VH and VL. The two active variable domains then are free to associate to form a functional anti-CD3 binding domain. It should be noted that in “format 1” embodiments, the resulting active component is trivalent: there is monovalent binding to CD3 and bivalent binding to the TTA, rendering a bispecific binding protein, although in some cases this trivalency could be trispecifics, with monovalent binding to CD3, monovalent binding to a first TTA and monovalent binding to a second TTA. FIG. 1 also shows an anti-human serum albumin (HSA) domain as a half-life extension domain, in many embodiments a sdABD as defined herein, although as discussed herein, this is optional and/or can be replaced by other half-life extension domains; additionally, the half-life extension domain can also be N-terminal to the construct or internal as well. FIG. 1 also has the VH and VL of the Fv and iVH and iVL of the pseudo Fv in a specific order, e.g. from N- to C-terminal, VH-linker-VL (and iVL-linker-iVH) although as will be appreciated by those in the art, these can be reversed (VL-linker-VH and iVH-linker-iVL). Alternatively, one of these Fvs can be in one orientation and the other in the other orientation, although the expression of protein in the orientation as shown here was surprisingly higher than the other orientations.

[0052] FIG. 2 depicts the “format 2” type of protease activation of the present invention, referred to herein as “constrained, non-cleavable constructs”, or “CNCL constructs”, also sometimes referred to herein as “dimerization constructs” as discussed herein. These constructs do not isomerize as discussed herein. Upon cleavage, two prodrug construct splits into four components, two half-life extension domains (in this case, sdABDs to HSA) linked to two pseudo domains (which may or may not be able to self-associate, depending on the length of the linkers and the inactivating mutations), and two active moieties that self-assemble into a dimeric active moiety that contains four anti-TTA domains (which can be all the same or two are the same and the other two are different). It should be noted that in “format 2” embodiments, the resulting active component is hexavalent: there is bivalent binding to CD3 and quadrivalent binding to the TTA, rendering a bispecific binding protein, although in some cases this hexavalency could be trispecifics, with bivalent binding to CD3, bivalent binding to a first TTA and bivalent binding to a second TTA. FIG. 2 also shows an anti-human serum albumin (HSA) domain as a half-life extension domain, in many embodiments a sdABD as defined herein, although as discussed herein, this is optional and/or can be replaced by other half-life extension domains; additionally, the half-life extension domain can also be N-terminal to the construct or internal as well. FIG. 2 also has the VH and VL of the Fv and iVH and iVL of the pseudo Fv in a specific order, e.g. from N- to C-terminal, VH-linker-VL (and iVL-linker-iVH) although as will be appreciated by those in the art, these can be reversed (VL-linker-VH and iVH-linker-iVL). Alternatively, one of these Fvs can be in one orientation and the other in the other orientation, although the expression of protein in the orientation as shown here was surprisingly higher than the other orientations.

[0053] FIGS. 3A-3B depict “format 3” type of constructs, also sometimes referred to as “hemi-constructs” or “hemi-COBRA™” as outlined herein, as these are two different polypeptide chains that together make up an MCE therapeutic as is further discussed herein. In this embodiment, the constructs are delivered in pairs, with the pre-cleavage intramolecular self-assembly resulting in inactive anti-CD3 Fv domains. Upon cleavage, the inert variable domains are released, and the two active variable domains then intermolecularly assemble, to form an active anti-CD3 binding domain. The two sdABD-TTAs bind to the corresponding receptor on the tumor cell surface, and the cleavage is done by a protease. This allows the intermolecular assembly, since the molecules are physically held in place, favoring the assembly of the active anti-CD3 domain. As above for formats 1 and 2, in this embodiment, the N- to C-terminal order of the variable domains can be reversed, or mixed as well. Furthermore, the sdABD(HSA) can be either at the N- or C-terminus of each hemi-construct. Pro16 has the sdABD(HSA) at the C terminus and Pro17 has it at the N-terminus. Pro19, has the sdABD(HSA) at the C-terminus. FIG. 3A shows Format 3 constructs with a single sdABD-TTA domain per hemi-construct, and FIG. 3B shows Format 3 constructs with two sdABD-TTAs per hemi-construct, in a “dual targeting” or “hetero-targeting” format. Note that FIG. 3B uses FOLR1 and EGFR as the two TTAs, but other combinations as outlined herein can also be used.

[0054] FIG. 4 depicts “format 4” type of constructs that are similar to “format 2” constructs but have only a single sdABD-TTA. The figure shows the sdABD-TTA to EGFR, but as will be appreciated by those in the art, other TTA can be used as well. Upon cleavage, the prodrug construct splits into two components, a half-life extension domain (in this case, sdABDs to HSA) linked to a pseudo Fv and an active moiety, that in the presence of a second active moiety from a different cleaved molecule, self-assembles into a dimeric active moiety that contains two anti-TTA domains. It should be noted that in “format 4” embodiments, the resulting active component is quadrivalent: there is bivalent binding to CD3 and bivalent binding to the TTA, rendering a bispecific binding protein. FIG. 4 also shows an anti-human serum albumin (HSA) domain as a half-life extension domain, in many embodiments a sdABD (½) as defined herein, although as discussed herein, this is optional and/or can be replaced by other half-life extension domains; additionally, the half-life extension domain can also be N-terminal to the construct or internal as well. FIG. 4 also has the VH and VL of the Fv and iVH and iVL of the pseudo Fv in a specific order, e.g. from N- to C-terminal, VH-linker-VL (and iVL-linker-iVH) although as will be appreciated by those in the art, these can be reversed (VL-linker-VH and iVH-linker-iVL). Alternatively, one of these Fvs can be in one orientation and the other in the other orientation, although the expression of protein in the orientation as shown here was surprisingly higher than the other orientations.

[0055] FIGS. 5A-5M depict a number of single domain tumor target antigen binding domain (sdTTA-ABDs) sequences of the invention, with the CDRs underlined. As is more fully outlined herein, these domains can be assembled in a wide variety of configurations in the present invention, including “format 1”, “format 2”, “format 3” and “format 4” orientations.

[0056] FIG. 6 depict a number of half-life extension domains.

[0057] FIGS. 7A and 7B depict a number of αCD3 variable heavy and variable light domains, including the active (e.g. “V_{L}” or “V_{H}”, sometimes also referred to as “aVL” or “aVH”) and inactive (e.g. “V_{Li}” or “V_{Hi}”, sometimes also referred to as “iVL” or “iVH”) domains. The CDRs are underlined.

[0058] FIGS. 8A-8D depict a number of suitable protease cleavage sites. As will be appreciated by those in the art, these cleavage sites can be used as cleavable linkers. In some embodiments, for example when more flexible cleavable linkers are required, there can be additional amino acids (generally glycines and serines) that are either or both N- and C-terminal to these cleavage sites.

[0059] FIGS. 9A-9V show a number of sequences of the invention, although many additional sequences are also found in the sequence listing. CDRs are underlined and bolded, linkers are double underlined (with cleavable linkers being italicized and double underlined) and domain separations are indicated by “/”. All His6 tags are optional, as they can be used to reduce immunogenicity in humans as well as be purification tags.

[0060] FIGS. 10A-10EE depict amino acid sequences of exemplary Format 2 constructs comprising a number of sdABD-B7H3 and a pseudo Fv domain (e.g., Vli2/Vh12 domains).

[0061] FIG. 11 illustrates the COBRA design and the predicted folding mechanism, with the predicted structure of the uncleaved molecule on the top, which still binds tumor antigen (EGFR, in the case of the MVC-101), has impaired CD3 binding and binds human serum albumin. The middle shows the predicted cleavage products and the left shows the active dimer.

[0062] FIGS. 12A-12Q depict additional sequences of some COBRAs of the present invention.

[0063] FIG. 13 shows that the format 2 constructs of the invention, once cleaved and dimerized, clear quickly from injected mice.

[0064] FIG. 14 shows the binding kinetics of Pro225.

[0065] FIGS. 15A-15B show that format 2 constructs, in this case Pro225, regresses established solid tumors in mice.

[0066] FIGS. 16A-16B show that the format 2 constructs of the invention, in this case Pro225, shows increased tolerability relative to inherently active T cell engagers. FIGS. 16C and 16D show that treatment with Pro225 results in lower cytokine release in mice, compared to an inherently active bispecific. Pro 225 does not induce IL2, TNFa, and IL10 in NHP and mouse IL6 in mice in comparison to inherently active T cell engagers

[0067] FIG. 17 shows the efficacy of a number of format 2 constructs of the invention in a T cell Dependent Cellular Cytotoxicity (TDCC) assay as outlined in Example 2. Pro233 is an aEGFR construct with an MMP9 cleavage site; Pro565 is an aEpCAM (h664) construct with an MMP9 cleavage site; Pro566 is an aEpCAM (h665) construct with an MMP9 cleavage site; Pro623 is a heteroCOBRA of aEGFR and aEpCAM (h664) and an MMP9 site; and Pro624 is a heteroCOBRA of aEGFR and aEpCAM (h665) and an MMP9 site.

[0068] FIG. 18 shows the efficacy of a number of format 2 constructs of the invention in a TDCC assay as outlined in Example 2. Pro233 is an aEGFR construct with an MMP9 cleavage site; Pro311 is an aFOLR1 construct with an MMP9 cleavage site; and Pro421 is a heteroCOBRA of aEGFR and aFOLR1 and an MMP9 site.

[0069] FIG. 19 shows the efficacy of a number of format 2 constructs of the invention in a TDCC assay as outlined in Example 2. Pro225 is an aB7H3 construct with an MMP9 cleavage site; Pro566 is an aEpCAM construct with an MMP9 cleavage site; Pro656 is a heteroCOBRA of aB7H3 and aEpCAM and an MMP9 site; and Pro658 is a heteroCOBRA of aEpCAM and aB7H3 and an MMP9 site.

[0070] FIG. 20 shows the efficacy of a number of format 2 constructs of the invention in a TDCC assay as outlined in Example 2 on two different cell lines. Pro225 is an aB7H3 construct with an MMP9 cleavage site; Pro566 is an aEpCAM construct with an MMP9 cleavage site; and Pro656 is a heteroCOBRA of aB7H3 and aEpCAM and an MMP9 site. HT29 is an epithelial cell line that, unlike Raji cell lines, make good xenografts in mice. HT29 expresses both target genes, (B7H3 and EpCAM), and in this case, the B7H3 expression was knocked out using CRISPR. Thus, the heteroCOBRA and the EpCAM single targeting COBRA killed both, while the B7H3 single targeting COBRA did not.

[0071] FIG. 21 shows the efficacy of a number of format 2 constructs of the invention in a TDCC assay as outlined in Example 2 on the HT29 cell line that has high EpCAM expression and low Trop2 expression. Pro824 is an aEpCAM×aTrop2 with an MMP9 linker heteroCOBRA. Pro825 is an aEpCAM×aTrop2 with a NCL heteroCOBRA (e.g., a non-cleavable control construct). Pro826 is an aTrop2×aEpCAM heteroCOBRA with an MMP9 linker. Pro827 is an aTrop2×aEpCAM with a NCL heteroCOBRA (non-cleavable control construct). Pro677 is an aTrop2/MMP9 COBRA and Pro566 is an aEpCAM/MMP9 COBRA. As the levels of the two antigens vary, the heteroCOBRAs maintain good killing while the killing with the monospecific (e.g., a single tumor antigen targeting) COBRAs varies. The monospecific COBRAs do not kill as well when the the expression level of their specific antigen drops (in this case Trop2); the same is true for FIGS. 22 and 23.

[0072] FIG. 22 shows the efficacy of a number of format 2 constructs of the invention in a TDCC assay as outlined in Example 2 on the HT116 cell line that has high EpCAM expression and very low Trop2 expression. Pro824 is an aEpCAM×aTrop2 with an MMP9 linker heteroCOBRA. Pro825 is an aEpCAM×aTrop2 with a NCL heteroCOBRA (non-cleavable control). Pro826 is an aTrop2×aEpCAM with an MMP9 linker heteroCOBRA. Pro827 is an aTrop2×aEpCAM with a NCL heteroCOBRA (non-cleavable control). Pro677 is an aTrop2/MMP9 mono-specific COBRA and Pro566 is aEpCAM/MMP9 mono-specific COBRA.

[0073] FIG. 23 shows the efficacy of a number of format 2 constructs of the invention in a TDCC assay as outlined in Example 2 on the BXPC3 cell line that has medium EpCAM expression and high Trop2 expression. Pro824 is an aEpCAM×aTrop2 with an MMP9 linker heteroCOBRA. Pro825 is an aEpCAM×aTrop2 with a NCL heteroCOBRA (non-cleavable control). Pro826 is an aTrop2×aEpCAM with an MMP9 linker heteroCOBRA. Pro827 is an aTrop2×aEpCAM with a NCL heteroCOBRA (non-cleavable control). Pro677 is an aTrop2/MMP9 mono-specific COBRA and Pro566 is an aEpCAM/MMP9 mono-specific COBRA.

[0074] FIG. 24 shows the in vivo efficacy of an aEpCAM COBRA with an MMP9 cleavage site using Protocol 2 of Example 3. Pro566 showed efficacy on LoVo tumors, as well as HT29, BxPC3 and SW403 tumor xenografts.

[0075] FIG. 25 shows the in vivo efficacy of an aTrop2 COBRA with an MMP9 cleavage site using Protocol 2 of Example 3. Pro677 showed efficacy on BxPC3 tumors, as well as HCC827 tumor xenografts.

[0076] FIG. 26 shows the in vivo efficacy of an aB7H3 COBRA with an MMP9 cleavage site using Protocol 3 of Example 3. Pro225 showed efficacy on A549 tumors.

[0077] FIGS. 27A-27E are a series of graphs demonstrating that a mono-specific COBRA containing two sdABD-HER2 (aHer2 hVIB1139) killed human or cyno HER2 expressing tumor cell lines conditionally in T-cell dependent cellular cytotoxicity (TDCC) assays. FIG. 27A: Human HER2-Raji cells were tested with various fusion proteins. FIG. 27B: Cyno Her2-Raji cells were tested with various fusion proteins. FIG. 27C: Raji cells tested with various fusion proteins. FIG. 27D: SKOV3 cells, with high expression of HER2, were tested with various fusion proteins. FIG. 27E: HT29 cells, with low expression of HER2, were tested with various fusion proteins. The tested fusion proteins were: Pro1123 NCL (non-cleavable control), Pro1117 MMP9 (uncleaved MMP9-containing COBRA) or, Pro1117 MMP9cl (cleaved MMP9-containing COBRA), or Pro1060 Pro51 format (positive control similar in format to anti-EGFR×CD3 positive control Pro51 as described in US2020/0347132 and WO2020/181140) and Pro1069 AD (active domain only). The amino acid sequence of Pro1117 is provided in FIG. 74 and SEQ ID NO:493.

[0078] FIGS. 28A-28E are a series of graphs demonstrating that a mono-specific COBRA containing two sdABD-HER2 (aHer2 h1159) killed human or cyno HER2 expressing tumor cell lines conditionally in TDCC assays. FIG. 28A: Human HER2-Raji cells were tested with various fusion proteins. FIG. 28B: Cyno HER2-Raji cells were tested with various fusion proteins. FIG. 28C: Raji cells tested with various fusion proteins. FIG. 28D: SKOV3 cells, with high expression of HER2, were tested with various fusion proteins. FIG. 28E: HT29 cells, with low expression of HER2, tested with various fusion proteins. The tested fusion proteins were: Pro1110 NCL, Pro1109 MMP9, Pro1109 MMP9cl, Pro 1062 Pro51 (positive control similar in format to anti-EGFR×CD3 positive control Pro51 as described in US2020/0347132 and WO2020/181140) and Pro1071 AD. The amino acid sequence of Pro1109 is provided in FIG. 73 and SEQ ID NO:491.

[0079] FIGS. 29A-29E are a series of graphs demonstrating that a mono-specific COBRA containing two sdABD-HER2 (aHER2 h1162) killed human or cyno HER2 expressing tumor cell lines conditionally in TDCC assays. FIG. 29A: Human HER2-Raji cells were tested with various fusion proteins FIG. 29B: Cyno HER2-Raji cells were tested with various fusion proteins. FIG. 29C: Raji cells tested with various fusion proteins. FIG. 29D: SKOV3 cells, with high expression of HER2, were tested with various fusion proteins. FIG. 29E: HT29 cells, with low expression of HER2, were tested with various fusion proteins. The tested fusion proteins were: Pro1112 NCL, Pro1111 MMP9, Pro 1111 MMP9cl, Pro1064 Pro51 and Pro1073 AD. The amino acid sequence of Pro111 is provided in FIG. 73 and SEQ ID NO:492.

[0080] FIGS. 30A-30E are a series of graphs demonstrating that a mono-specific COBRA containing two sdABD-HER2 (aHer2 h1156) killed human or cyno HER2 expressing tumor cell lines conditionally in TDCC assays conditionally. FIG. 30A: Human HER2-Raji cells were tested with various fusion proteins FIG. 30B: Cyno HER2-Raji cells tested with various fusion proteins. FIG. 30C: Raji cells tested with various fusion proteins. FIG. 30D: SKOV3 cells, with high expression of HER2, were tested with various fusion proteins. FIG. 30E: HT29 cells, with low expression of HER2, were tested with various fusion proteins. The tested fusion proteins were: Pro 1124 NCL, Pro1118 MMP9, Pro 1118 MMP9cl and Pro106 Pro51. The amino acid sequence of Pro1118 is provided in FIG. 74 and SEQ ID NO:494.

[0081] FIGS. 31A-31C are a series of graphs depicting the results of aHER2 Pro51 fusion proteins leads Pro1043 VIB1139, Pro 1044 VIB1156, Pro1045 VIB1159 and Pro1047 VIB1162 which were selected for demonstrating good activity and cynomolgus cross-reactivity in TDCC assays, whereas Pro1036 VIB1055 and Pro1038 VIB1059 showed poor activity.

[0082] FIG. 32 is a graph demonstrating that HER2/MMP9 COBRA regresses established N87 xenografts. Pro1118 was used in this assay at a dose of 100 ug/kg.

[0083] FIG. 33 is a graph demonstrating that HER2/MMP9 COBRA PK was consistent with murine HER2 binding. Pro1111 was used in this assay at a dose of 30 ug/kg.

[0084] FIG. 34 is a table depicting the epitope binning of various HER2 sdAbs. Competing antibodies at 100 nM were tested with saturating antibodies at 333 nM. The tested aHER2 antibodies were: VIB1121, VIB1139, VIB1058, VIB1097, trastuzumab, VIB1156, VIB1160, VIB1159, and VIB1162. “B” refers to binding of competing Ab and “NB” refers to no binding of a competing Ab.

[0085] FIG. 35 is a table depicting the epitope binning of various HER2 sdAbs. Competing antibodies at 100 nM were tested with saturating antibodies at 333 nM. The tested antibodies were: Pro1118, Pro1111, Trastuzumab, and Pertuzumab. “B” refers to binding of competing Ab and “NB” refers to no binding of a competing Ab.

[0086] FIG. 36 is a listing of the amino acids locations and sequences for the epitope mapping of HER2 sdAb h1156 (SEQ ID NO:503) and HER2 sdAb h1162 (SEQ ID NO:511).

[0087] FIG. 37 is a table depicting the affinities of HER2 sdAbs in a Pro51 format. Various sdAb and fusion proteins combinations were assessed in human, cyno and mouse. The combinations were the following: 1055 and Pro1036; 1058 and Pro1037; 1059 and Pro1038; 1091 and Pro1039; 1092 and Pro1040; 1097 and Pro1041; 1121 and Pro1042; 1139 and Pro1043; 1156 and Pro1044; 1159 and Pro1045; 1160 and Pro1046; 1162 and Pro1047; h1058 and Pro1056; h1092 and Pro1057; h1097 and Pro1058; h1121 and Pro1059; h1139 and Pro1060; h1156 and Pro1061; h1159 and Pro1062; h1160 and Pro1063; and h1162 and Pro1064.

[0088] FIGS. 38A-38C are a series of graphs demonstrating that a mono-specific COBRA containing two sdABD-CA9 (aCA9 h407) killed human or cyno CA9 expressing tumor cell lines conditionally in TDCC assays. FIG. 38A: Human CA9-Raji cells were tested with various fusion proteins. FIG. 38B: Cyno CA9-Raji cells were tested with various fusion proteins. FIG. 38C: HT29 cells were tested with various fusion proteins. The tested fusion proteins were: Pro514 NCL, Pro518 MMP9, Pro518 MMP9cl, Pro511 Pro51, and Pro521 AD. The amino acid sequence of Pro518 is provided in FIG. 10AA and SEQ ID NO:331.

[0089] FIGS. 39A-39C are a series of graphs demonstrating that a mono-specific COBRA containing two sdABD-CA9 (aCA9 h445) killed human or cyno CA9 expressing tumor cell lines conditionally. FIG. 39A: Human CA9-Raji cells were tested with various fusion proteins. FIG. 39B: Cyno CA9-Raji cells were tested with various fusion proteins. FIG. 39C: HT29 cells were tested with various fusion proteins. The tested fusion proteins were: Pro515 NCL, Pro519 MMP9, Pro519 MMP9cl, and Pro512 Pro51. The amino acid sequence of Pro519 is provided in FIG. 10BB and SEQ ID NO:332.

[0090] FIGS. 40A-40C are a series of graphs demonstrating that a mono-specific COBRA containing two sdABD-CA9 (aCA9 h456) killed human or cyno CA9 expressing tumor cell lines conditionally in TDCC assays. FIG. 40A: Human CA9-Raji cells were tested with various fusion proteins. FIG. 40B: Cyno CA9-Raji cells were tested with various fusion proteins. FIG. 40C: HT29 cells tested with various fusion proteins. The tested fusion proteins were: Pro1095 NCL, Pro516 MMP9, Pro516 MMP9cl, and Pro509 Pro51. The amino acid sequence of Pro516 is provided in FIG. 10Z and SEQ ID NO:329.

[0091] FIGS. 41A-41C are a series of graphs demonstrating that a mono-specific COBRA containing two sdABD-CA9 (aCA9 h476) killed human or cyno CA9 expressing tumor cell lines conditionally in TDCC assays. FIG. 41A: Human CA9-Raji cells were tested with various fusion proteins FIG. 41B: Cyno CA9-Raji cells were tested with various fusion proteins. FIG. 41C: HT29 cells were tested with various fusion proteins. The tested fusion proteins were: Pro513 NCL, Pro517 MMP9, Pro517 MMP9cl, Pro520 AD and Pro510 Pro51. The amino acid sequence of Pro517 is provided in FIG. 10AA and SEQ ID NO:330.

[0092] FIG. 42 is a table depicting the affinities of CA9 sdAbs in Pro51 format. Various sdAbs, combinations of sdAbs, and fusion proteins were assessed in human, cyno and mouse. The sdAbs were the following: h407, h445, h456, h472 and h476 and the combinations were the following: h445 and Pro512; h456 and Pro509; and h476 and Pro510.

[0093] FIGS. 43A-43B are a series of graphs demonstrating that CA9/MMP9 hetero-COBRAs regressed established tumor xenografts. Tumor SNU-16 in presence of Pro513, non cleavable control, Pro517 and Pro518, all at a dose of 300 ug/kg. Tumor 786-0 in presence of Pro513 and Pro517, all at a dose of 100 ug/kg.

[0094] FIG. 44 is a graph showing that CA9/MMP9 hetero-COBRAs. The PK for Pro516 is consistent with it binding to the mouse CA9 protein. Pro517 and Pro 516 were used at dose of 100 ug/kg.

[0095] FIGS. 45A-45D are a series of graphs demonstrating that EGFR/EpCAM hetero-COBRAs induced TDCC of Raji cells expressing one or both antigens. Raji-parental cells (FIG. 45A), Raji-EGFR cells (FIG. 45B), Raji-EpCAM cells (FIG. 45C), and Raji-EGFR/EpCAM cells (FIG. 45D) were tested with mono-specific COBRAs (Pro233 EGFR/EGFR mono-specific COBRAs) and Pro566 (EpCAM/EpCAM mono-specific COBRAs) and with hetero-COBRAs (Pro624 EGFR/EpCAM hetero-COBRAs) and Pro698 (EpCAM/EGFR hetero-COBRAs). All COBRAs were pre-cleaved.

[0096] FIGS. 46A-46C are a series of graphs demonstrating that EGFR/EpCAM hetero-COBRAs comprising EGFR sdABD hD12 and EpCAM sdABD h665 induced TDCC on HT29 cells expressing both antigens. FIG. 46A: the EGFR/EpCAM hetero-COBRA were tested with Pro623 MMP9, Pro623 cleaved, Pro625 NCL, and with a buffer as a control. FIG. 46B: the EGFR/EpCAM hetero-COBRA (EpCAM sdABD h665/EGFR sdABD hD12) were tested with Pro698 MMP9, Pro698 MMP9cl, Pro699 NCL, and with a buffer as a control. FIG. 46C: the EGFR/EpCAM hetero-COBRA (hD12/h665) were tested with Pro624 MMP9, Pro624 MMP9cl, Pro626 NCL, and with a buffer as a control. The amino acid sequence of Pro624 are provided in FIG. 10W and SEQ ID NO:323. The amino acid sequence of Pro623 are provided in FIG. 10X and SEQ ID NO:322. The amino acid sequence of Pro698 are provided in FIG. 10X and SEQ ID NO:324.

[0097] FIGS. 47A-47C are a series of graphs demonstrating that EGFR/FOLR1 hetero-COBRA induces TDCC on Raji cells expressing one or both antigens. Raji-EGFR cells (FIG. 47A), Raji-FOLR1 cells (FIG. 47B), Raji-EGFR/FOLR1 cells (FIG. 47C) were tested with mono-specific COBRAs: Pro233 (EGFR/EGFR) and Pro311 (FOLR1/FOLR1) and with hetero-COBRAs: Pro421 (EGFR/FOLR1) and Pro420 (FOLR1/EGFR). All COBRAs were pre-cleaved. The amino acid sequence of Pro420 are provided in FIG. 9G and SEQ ID NO:421. The amino acid sequence of Pro421 are provided in FIG. 9G and SEQ ID NO:422. The amino acid sequence of Pro233 are provided in FIG. 9D and SEQ ID NO:415. The amino acid sequence of Pro311 are provided in FIG. 9D and SEQ ID NO:416.

[0098] FIGS. 48A-48C are a series of graphs demonstrating that aFOLR1/aEGFR hetero-COBRA comprising EGFR D12 and FOLR1 h59-3 killed tumor cell lines expressing both FOLR1 and EGFR conditionally. FIG. 48A: H292 cells were tested with the mono-specific COBRAs: Pro214 NCL (EGFR D12), Pro186 MMP9 (EGFR D12), and Pro186 MMP9cl (EGFR D12). FIG. 48B: H292 cells were tested with the mono-specific COBRAs: Pro303 NCL (FOLR1 h59-3), Pro312 MMP9 (FOLR1 h59-3), and Pro312 MMP9cl (FOLR1 h59-3). FIG. 48C: H292 cells were tested with the hetero-COBRAs: Pro550 NCL (EGFR D12/FOLR1 h59-3), Pro551 MMP9 (EGFR D12/FOLR1 h59-3), and Pro551 (MMP9cl EGFR D12/FOLR1 h59-3). The amino acid sequence of Pro551 are provided in FIG. 10V and SEQ ID NO:320.

[0099] FIGS. 49A-49D are a series of graphs demonstrating that aFOLR1(h77.2)/aEGFR (hD12) killed tumor cell lines expressing both FOLR1 and EGFR conditionally. FIG. 49A: H292 cells were tested with the mono-specific COBRAs: Pro600 NCL (EGFR/EGFR), Pro233 MMP9 EGFR/EGFR, and Pro233 MMP9cl (EGFR/EGFR). FIG. 49B: H292 cells were tested with the mono-specific COBRAs: Pro299 NCL FOLR1/FOLR1, Pro311 MMP9 (FOLR1/FOLR1), and Pro311 MMP9cl (FOLR1/FOLR1). FIG. 49C: H292 cells were tested with the hetero-COBRAs: Pro420 MMP9 (FOLR1/EGFR), and Pro420 MMP9cl (FOLR1/EGFR). FIG. 49D: H292 cells were tested with the hetero-COBRAs: Pro421 MMP9 (EGFR/FOLR1), and Pro421 MMP9cl (EGFR/FOLR1). The amino acid sequence of Pro420 are provided in FIG. 9G and SEQ ID NO:421. The amino acid sequence of Pro421 are provided in FIG. 9G and SEQ ID NO:422.

[0100] FIG. 50 is a table listing the affinities of EGFR/FOLR1 HeteroCOBRA vs Pro51 format molecules.

[0101] FIGS. 51A-51D are a series of graphs demonstrating that Pro566 aEpCAM (h664) killed EpCAM Raji transfectants and tumor cell lines expressing EpCAM conditionally. Trop2-Raji cells (FIG. 51A), EpCAM-Raji cells (FIG. 51B), SKOV3 cells (FIG. 51C), and HT29 cells (FIG. 51D) were all tested with Pro566 and cleaved Pro566 (Pro566cl).

[0102] FIGS. 52A-52D are a series of graphs demonstrating that Pro677 aTrop2 (h557) kills Trop2 Raji transfectants and tumor cell lines expressing Trop2 conditionally. Trop2-Raji cells (FIG. 52A), EpCAM-Raji cells (FIG. 52B), SKOV3 cells (FIG. 52C), and HT29 cells (FIG. 52D) were all tested with Pro677 and cleaved Pro677 (Pro677cl.)

[0103] FIGS. 53A-53D are a series of graphs demonstrating that Pro824 aEpCAM (h664)/aTROP2 (h557) kills Raji transfectants and tumor cell lines expressing both TROP2 and EpCAM conditionally. Trop2-Raji cells (FIG. 53A), EpCAM-Raji cells (FIG. 53B), SKOV3 cells (FIG. 53C), and HT29 cells (FIG. 53D) were all tested with Pro824 and cleaved Pro824 (Pro824cl.)

[0104] FIGS. 54A-54D are a series of graphs demonstrating that Pro826 aTROP2 (h557)/aEpCAM (h664) kills Raji transfectants and tumor cell lines expressing both TROP2 and EpCAM conditionally. Trop2-Raji cells (FIG. 54A), EpCAM-Raji cells (FIG. 54B), SKOV3 cells (FIG. 54C), and HT29 cells (FIG. 54D) were all tested with Pro826 and cleaved Pro826 (Pro826cl).

[0105] FIGS. 55A-55D are a series of graphs demonstrating that EpCAM and Trop2 COBRAs and HeteroCOBRAs all work well on BXPC3. FIG. 55A: BXPC3 cells were tested with Pro569 NCL, Pro566 MMP9 and Pro566 MMP9cl. FIG. 55B: BXPC3 cells were tested with Pro681 NCL, Pro677 MMP9 and Pro677 MMP9cl. FIG. 55C: BXPC3 cells were tested with Pro825 NCL, Pro824 MMP9 and Pro824 MMP9cl. FIG. 55D: BXPC3 cells were tested with Pro827 NCL, Pro826 MMP9 and Pro826 MMP9cl.

[0106] FIGS. 56A-56D are a series of graphs demonstrating that EpCAM and Trop2 COBRAS and Hetero-COBRAs all work well on HCT116. FIG. 56A: HCT116 cells (human colon cancer cell line) were tested with Pro569 NCL, Pro566 MMP9, and Pro566 MMP9cl. FIG. 56B: HCT116 cells were tested with Pro681 NCL, Pro677 MMP9, and Pro677MMP9cl. FIG. 56C: HCT116 cells were tested with Pro825 NCL, Pro824 MMP9, and Pro824 MMP9cl. FIG. 56D: HCT116 cells were tested with Pro827 NCL, Pro826 MMP9 and Pro846 MMP9cl.

[0107] FIGS. 57A-57D are a series of graphs demonstrating that EpCAM and Trop2 COBRAS and Hetero-COBRAs all work well on SCC25. FIG. 57A: SCC25 cells were tested with Pro569 NCL, Pro566 MMP9, and Pro566 MMP9cl. The amino acid sequence of Pro566 is provided in FIG. 10F and SEQ ID NO:289. FIG. 57B: SCC25 cells were tested with Pro681 NCL, Pro677 MMP9, and Pro677 MMP9cl. The amino acid sequence of Pro677 is provided in FIG. 10K and SEQ ID NO:298. FIG. 57C: SCC25 cells were tested with Pro825 NCL, Pro824 MMP9, and Pro824 MMP9cl. The amino acid sequence of Pro824 is provided in FIG. 12Q and SEQ ID NO:485. FIG. 57D: SCC25 cells were tested with Pro827 NCL, Pro826 MMP9, and Pro826 MMP9cl. The amino acid sequence of Pro826 is provided in FIG. 12Q and SEQ ID NO:486.

[0108] FIGS. 58A-58D are a series of graphs demonstrating that B7H3/EpCAM HeteroCOBRAs induce TDCC on cells expressing one or both antigens. Raji-parental cells (FIG. 58A), Raji-B7H3 cells (FIG. 58B), Raji-EpCAM cells (FIG. 58C), and Raji-B7H3/EpCAM cells (FIG. 58D) were tested with mono-specifc COBRAs: Pro225 (B7H3/B7H3) and Pro566 (EpCAM/EpCAM) and with hetero-COBRAs: Pro656 (B7H3/EpCAM) and Pro658 (EpCAM/B7H3). All COBRAs were pre-cleaved. The amino acid sequence of Pro225 is provided in FIG. 10DD and SEQ ID NO:336. The amino acid sequence of Pro566 is provided in FIG. 10F and SEQ ID NO:289. The amino acid sequence of Pro656 is provided in FIG. 10Y and SEQ ID NO:326. The amino acid sequence of Pro658 is provided in FIG. 10Z and SEQ ID NO:328.

[0109] FIGS. 59A-59D are a series of graphs depicting the results for CRISPR knockout lines. HT29 cells (FIG. 59A), HT29-B7H3 KO cells (FIG. 59B), HT29-EpCAM KO cells (FIG. 59C), and HT29-B7H3/EpCAM KO cells (FIG. 59D) were all tested with mono-specific COBRAs: Pro225 (B7H3/B7H3) and Pro566 (EpCAM/EpCAM) and with a hetero-COBRA: Pro656 (B7H3/EpCAM). All COBRAs were pre-cleaved. The amino acid sequence of Pro225 is provided in FIG. 10DD and SEQ ID NO:336. The amino acid sequence of Pro566 is provided in FIG. 10F and SEQ ID NO:289. The amino acid sequence of Pro656 is provided in FIG. 10Y and SEQ ID NO:326.

[0110] FIGS. 60A-60D are a series of graphs demonstrating that EpCAM/B7H3 hetero-COBRAs comprising aEpCAM sdABD (h664) and aB7H3 sdABD (hF7) killed tumor cell lines expressing both EpCAM and B7H3 conditionally. FIG. 60A: IGROV cells were tested with Pro295 NCL (B7H3), Pro225 MMP9 (B7H3) and Pro225 MMP9cl (B7H3). FIG. 60B: IGROV cells were tested with Pro568 NCL (EpCAM), Pro565 MMP9 (EpCAM), and Pro565 MMP9cl (EpCAM). FIG. 60C: IGROV cells were tested with Pro659 NCL (B7H3/EpCAM), Pro655 MMP9 (B7H3/EpCAM) and Pro655 MMP9cl (B7H3/EpCAM). FIG. 60D: IGROV cells were tested with Pro661 NCL (EpCAM/B7H3), Pro657 MMP9 (EpCAM/B7H3) and Pro657 MMP9cl (EpCAM/B7H3). The amino acid sequence of Pro655 is provided in FIG. 10X and SEQ ID NO:325. The amino acid sequence of Pro657 is provided in FIG. 10Y and SEQ ID NO:327.

[0111] FIGS. 61A-61D are a series of graphs demonstrating that aEpCAM/aB7H3 hetero-COBRAs comprising an aEpCAM sdABD (h665) and an aB7H3 sdABD (hF7) sdABD killed tumor cell lines expressing both EpCAM and B7H3 conditionally. FIG. 61A: IGROV cells were tested with Pro295 NCL (B7H3), Pro225 MMP9 (B7H3) and Pro225 MMP9cl (B7H3). FIG. 61B: IGROV cells were tested with Pro569 NCL (EpCAM), Pro566 MMP9 (EpCAM), and Pro566 MMP9cl (EpCAM). FIG. 61C: IGROV cells were tested with Pro660 NCL (B7H3/EpCAM), Pro656 MMP9 (B7H3/EpCAM) and Pro656 MMP9cl (B7H3/EpCAM). FIG. 61D: IGROV cells were tested with Pro662 NCL (EpCAM/B7H3), Pro658 MMP9 (EpCAM/B7H3) and Pro658 MMP9cl (EpCAM/B7H3). The amino acid sequence of Pro656 is provided in FIG. 10Y and SEQ ID NO:326. The amino acid sequence of Pro658 is provided in FIG. 10Z and SEQ ID NO:328.

[0112] FIGS. 62A-62D are a series of graphs demonstrating that aEpCAM/aB7H3 hetero-COBRAs comprising an aEpCAM sdABD (h664) and an aB7H3 sdABD (hF7) killed tumor cell lines expressing both EpCAM and B7H3 conditionally. FIG. 62A: H292 cells were tested with Pro295 NCL (B7H3), Pro225 MMP9 (B7H3) and Pro225 MMP9cl (B7H3). FIG. 62B: H292 cells were tested with Pro568 NCL (EpCAM), Pro565 MMP9 (EpCAM), and Pro565 MMP9cl (EpCAM). FIG. 62C: H292 cells were tested with Pro659 NCL (B7H3/EpCAM), Pro655 MMP9 (B7H3/EpCAM) and Pro655 MMP9cl (B7H3/EpCAM). FIG. 62D: H292 cells were tested with Pro661 NCL (EpCAM/B7H3), Pro657 MMP9 (EpCAM/B7H3) and Pro657 MMP9cl (EpCAM/B7H3).

[0113] FIGS. 63A-63D are a series of graphs demonstrating that aEpCAM/aB7H3 hetero-COBRAs comprising an aEpCAM sdABD (h665) and an aB7H3 sdABD (hF7) killed tumor cell lines expressing both EpCAM and B7H3 conditionally. FIG. 63A: H292 cells were tested with Pro295 NCL (B7H3), Pro225 MMP9 (B7H3) and Pro225 MMP9cl (B7H3). FIG. 63B: H292 cells were tested with Pro569 NCL (EpCAM), Pro566 MMP9 (EpCAM), and Pro566 MMP9cl (EpCAM). FIG. 63C: H292 cells were tested with Pro660 NCL (B7H3/EpCAM), Pro656 MMP9 (B7H3/EpCAM) and Pro656 MMP9cl (B7H3/EpCAM). FIG. 63D: H292 cells were tested with Pro662 NCL (EpCAM/B7H3), Pro658 MMP9 (EpCAM/B7H3) and Pro658 MMP9cl (EpCAM/B7H3).

[0114] FIGS. 64A-64D are a series of graphs depicting the effect of T cell Dependent Cellular Cytotoxicity (TDCC) on tumor cell lines. HT29 cells (FIG. 64A), U87-MG (EpCAM-negative) cells (FIG. 64B), Capan2 cells (FIG. 64C), and VCAP cells (FIG. 64D) were all tested with mono-specific COBRAs: Pro225 (B7H3/B7H3) and Pro566 (EpCAM/EpCAM) and with hetero-COBRAs: Pro656 (B7H3/EpCAM) and Pro658 (EpCAM/B7H3). All COBRAs were pre-cleaved.

[0115] FIG. 65 is a graph depicting Jurkat luciferase T cell activation on HT29 Cells. The HT29 cells were tested with mono-specific COBRAs: Pro225 (B7H3/B7H3) and Pro566 (EpCAM/EpCAM) and with hetero-COBRAs: Pro656 (B7H3/EpCAM) and Pro658 (EpCAM/B7H3). All COBRAs were pre-cleaved.

[0116] FIGS. 66A-66D are a series of graphs showing that the activity of hetero-COBRAs on HT29 cells is less sensitive to inhibition by soluble antigen compared to monospecific COBRAs. The cells were assayed with soluble EpCAM, soluble B7H3 4Ig and with no antigen (control) together with mono-specific COBRAs: Pro225 (B7H3/B7H3) in FIG. 66A and Pro566 (EpCAM/EpCAM) in FIG. 66B and with hetero-COBRAs: Pro656 (B7H3/EpCAM) in FIG. 66C and Pro658 (EpCAM/B7H3) in FIG. 66D. A stronger inhibition was detected with the mono-specific COBRAs. All COBRAs were pre-cleaved.

[0117] FIG. 67 is a table depicting the binding affinities of B7H3/EpCAM hetero-COBRAs. Antigens including huB7H3-4Ig alone, huEpCAM and huB7H3-4Ig, and huEpCAM alone were assayed with hetero-COBRAs Pro656 (B7H3/EpCAM) and Pro658 (EpCAM/B7H3).

[0118] FIG. 68 is a graph depicting the pharmacokinetics of various B7H3/EpCAM heteroCOBRAs.

[0119] FIG. 69 is a graph showing that B7H3/EpCAM hetero-COBRAs are active in the HT29 cell line derived xenograft model in mice. Dosages of hetero-COBRAa such as Pro660 NCL (B7H3/EpCAM; 0.3 mg/kg), Pro656 MMP9 (B7H3/EpCAM; 0.01 mg/kg), Pro656 MMP9 (B7H3/EpCAM; 0.03 mg/kg) and Pro656 MMP9 (0 B7H3/EpCAM; 1 mg/kg) were administered at various time intervals.

[0120] FIG. 70 is a graph showing that B7H3/EpCAM heteroCOBRAs are active in the HT29 cell line derived xenograft model in mice. Dosages of heteroCOBRAs such as Pro662 NCL (EpCAM/B7H3; 0.1 mg/kg) and Pro658 MMP9 (EpCAM/B7H3; 0.1 mg/kg) were administered at various time intervals.

[0121] FIGS. 71-72 provide additional sequences of exemplary heteroCOBRAs (dual targeting COBRAs) described herein.

[0122] FIGS. 73-74 provide additional sequences of exemplary monospecific HER2 COBRAs (single targeting COBRAs).

[0123] FIG. 75 provides sequences of a humanized anti-EpCAM sdAb h664 and humanized anti-HER2 sdAbs h1139, h1156, h1159 and h1162 described herein.

### DETAILED DESCRIPTION OF THE INVENTION

### Introduction

[0124] The present invention is directed to methods of reducing the toxicity and side effects of bispecific antibodies (including antibody-like functional proteins) that bind to important physiological targets such as CD3 and tumor antigens. Many antigen binding proteins, such as antibodies, can have significant side effects by targeting normal tissues, and thus there is a need to only activate the binding capabilities of a therapeutic molecule in the vicinity of the disease tissue, to avoid normal tissue interactions. Accordingly, the present invention is directed to multivalent conditionally effective (“MCE”) proteins that have a number of functional protein domains. In general, one of these domains is an antigen binding domain (ABD) that will bind a target tumor antigen (TTA), and another is an ABD that will bind a T-cell antigen such as CD3 under certain conditions. Additionally, the MCE proteins also include one or more protease cleavage sites. That is, the therapeutic molecules are made in a “pro-drug” like format, wherein the CD3 binding domain is inactive until exposed to a tumor environment. The tumor environment contains proteases, such that upon exposure to the protease, the prodrug is cleaved and becomes active.

[0125] This is generally accomplished herein by using proteins that include a “pseudo” variable heavy domain and a “pseudo” variable light domain directed to the T-cell antigen such as CD3, that restrain the CD3 Fvs of the MCE into an inactive format as is discussed herein. As the TTA targets the MCE into the proximity of the tumor, the MCE is thus exposed to the protease. Upon cleavage, the active variable heavy domain and active light domain are now able to pair to form one or more active ABDs to CD3 and thus recruit T cells to the tumor, resulting in treatment.

[0126] In general, the CD3 binding domain (“Fv”) is in a constrained format, wherein the linker between the active variable heavy domain and the active variable light domain that traditionally form an Fv is too short to allow the two active variable domains to bind each other; this is referred to as “constrained linker”; these can be constrained and cleavable (CCL, as used in Format 1) or constrained and not cleavable (CNCL, as used in Format 2). Rather, in the prodrug (e.g., uncleaved) format, the prodrug polypeptide also comprises a “pseudo Fv domain”. The pseudo Fv domain comprises a variable heavy and light domain, with standard framework regions, but “inert” or “inactive” CDRs. The pseudo Fv domain also has a constrained linker between the inactive variable heavy and inactive variable light domains. Since neither Fv nor pseudo Fv domains can self-assemble due to the steric constraints, there is an intramolecular assembly that pairs the aVL with the iVH and the aVH with the iVL, due to the affinity of the framework regions of each. However, due to the “inert” CDRs of the pseudo domain, the resulting ABDs will not bind CD3, thus preventing toxicities outside the diseased tissue, such as a tumor. However, in the presence of proteases that are in or near the tumor, the prodrug construct is cleaved such that the pseudo-Fv domain is released from the surface and thus allows the “real” variable heavy and variable light domains to associate intermolecularly (e.g. two cleaved constructs come together), thus triggering active CD3 binding and the resulting tumor efficacy. These constructs are generally referred to herein as COnditional Bispecific Redirected Activation constructs, or “COBRAs™”. The stability of the intramolecular assembly is shown by the conditionality experiments herein, whereby in the absence of protease, the uncleaved constructs have no activity (e.g. no active CD3 binding domain is formed).

[0127] Interestingly, for ease of description, while these constructs are all referred to herein as “constrained”, additional work shows that the intramolecular assembly is favored even if one of the Fv domains is not constrained, e.g. one of the domains can have a longer, flexible linker. That is, as shown in the FIGS. 37-39, intramolecular assembly still occurs (e.g. the uncleaved constructs are inactive in the absence of protease cleavage) if only one of the Fv domains, either the one with an active VL and VH, or the pseudo Fv domain, is constrained. However, in the current systems, when both linkers are constrained, the protein has better expression. However, as will be appreciated by those of skill in the art, any of the Format 1, Format 2 or Format 4 constructs herein can have one of these Fv domains with an “unconstrained” or “flexible” linker. For ease of reference, the constructs are shown with both Fv domains in a constrained format.

[0128] The constructs and formats of the invention are variations over embodiments described in WO2017/156178, WO2019/051102, WO2020/181140, US2019/0076524, and US2020/0347132, hereby expressly incorporated by reference in their entireties. As shown in FIGS. 17-21 of WO2017/156178, the Figures of WO2019/051102, and the Figures of WO2020/181140, previous constructs have the ability to isomerize due to the presence of two sets of VH and VL domains in a single polypeptide, forming both a bivalent scFv and a single chain diabody. Even after purification of each isoform, the bivalent construct can still reach equilibrium with the diabody isoform. As the single chain diabody has the ability to bind to CD3 in the absence of protease cleavage, the utility of the construct is diminished.

[0129] To solve this issue, the present invention provides for four separate types of constructs to accomplish this conditional activation. The prodrug activation can happen in one of four general ways, as is generally shown in the Figures. In FIG. 1, a “format 1” mechanism is shown. In this embodiment, the prodrug construct has two cleavage sites: one between the VH and vl domains of the constrained Fv, thus freeing the two variable domains to associate, and a second at a site that releases the pseudo Fv domain from the prodrug construct, leaving two molecules that associate due to the innate self-assembly of the variable heavy and variable light domains, each having an antigen binding domain to a tumor antigen as well, thus allowing the recruitment of T cells to the tumor site.

[0130] In an alternate embodiment, the prodrug construct is shown in FIG. 2, a “format 2” mechanism. In this embodiment, the domain linker between the active variable heavy and active light chains is a constrained but not cleavable linker (“CNCL”). In the prodrug format, the inactive VH and VL of the constrained pseudo Fv domain associate with the VH and VL of the constrained Fv domain, such that there is no CD3 binding. However, once cleavage in the tumor environment happens, two different activated proteins, each comprising an active variable heavy and light domain, associate to form two anti-CD3 binding domains. This format 2 has two target tumor antigen binding domains (“TTA-ABDs”) which as more fully described below, can either be identical (e.g. “homo-COBRAs”), or different (e.g. “hetero-COBRAs”). If different, they can each be directed to a different tumor antigen, or they can be directed to the same tumor antigen, but different epitopes, as is more fully described below.

[0131] In addition to the “single chain protein” COBRA formats discussed above, where all of the components are contained on a single amino acid sequence, there are also constructs that rely on two proteins “hemi-COBRAs”, which act in pairs, as shown in FIG. 3. In this embodiment, each protein has one active and one inert variable domain separated by a protease cleavage site. Each molecule contains a TTA binding domain, such that when the molecules are bound to the TTA and exposed to tumor protease, the inert domains are cleaved off and the two active variable domains self-assemble to form an anti-CD3 binding domain.

[0132] Furthermore, the invention provides “format 4” constructs as well, as depicted in FIG. 4. These are similar to the “format 2” designs, except that a single ABD to a TTA is used, such that upon cleavage, two of the pro-drug molecules now form a tetravalent, bispecific construct containing two active anti-CD3 domains, as is further described below.

[0133] Accordingly, the formats and constructs of the invention find use in the treatment of disease.

### Definitions

[0134] In order that the application may be more completely understood, several definitions are set forth below. Such definitions are meant to encompass grammatical equivalents.

[0135] By “amino acid” and “amino acid identity” as used herein is meant one of the 20 naturally occurring amino acids or any non-natural analogues that may be present at a specific, defined position. In many embodiments, “amino acid” means one of the 20 naturally occurring amino acids. By “protein” herein is meant at least two covalently attached amino acids, which includes proteins, polypeptides, oligopeptides and peptides.

[0136] By “amino acid modification” herein is meant an amino acid substitution, insertion, and/or deletion in a polypeptide sequence or an alteration to a moiety chemically linked to a protein. For example, a modification may be an altered carbohydrate or PEG structure attached to a protein. For clarity, unless otherwise noted, the amino acid modification is always to an amino acid coded for by DNA, e.g. the 20 amino acids that have codons in DNA and RNA. The preferred amino acid modification herein is a substitution.

[0137] By “amino acid substitution” or “substitution” herein is meant the replacement of an amino acid at a particular position in a parent polypeptide sequence with a different amino acid. In particular, in some embodiments, the substitution is to an amino acid that is not naturally occurring at the particular position, either not naturally occurring within the organism or in any organism. For clarity, a protein which has been engineered to change the nucleic acid coding sequence but not change the starting amino acid (for example exchanging CGG (encoding arginine) to CGA (still encoding arginine) to increase host organism expression levels) is not an “amino acid substitution”; that is, despite the creation of a new gene encoding the same protein, if the protein has the same amino acid at the particular position that it started with, it is not an amino acid substitution.

[0138] By “amino acid insertion” or “insertion” as used herein is meant the addition of an amino acid sequence at a particular position in a parent polypeptide sequence.

[0139] By “amino acid deletion” or “deletion” as used herein is meant the removal of an amino acid sequence at a particular position in a parent polypeptide sequence.

[0140] The polypeptides of the invention specifically bind to CD3 and target tumor antigens (TTAs) such as target cell receptors, as outlined herein. “Specific binding” or “specifically binds to” or is “specific for” a particular antigen or an epitope means binding that is measurably different from a non-specific interaction. Specific binding can be measured, for example, by determining binding of a molecule compared to binding of a control molecule, which generally is a molecule of similar structure that does not have binding activity. For example, specific binding can be determined by competition with a control molecule that is similar to the target.

[0141] Specific binding for a particular antigen or an epitope can be exhibited, for example, by an antibody having a KD for an antigen or epitope of at least about 10⁻⁴ M, at least about 10⁻⁵ M, at least about 10⁻⁶ M, at least about 10⁻⁷ M, at least about 10⁻⁸ M, at least about 10⁻⁹ M, alternatively at least about 10⁻¹⁰ M, at least about 10⁻¹¹ M, at least about 10⁻¹² M, or greater, where KD refers to a dissociation rate of a particular antibody-antigen interaction. Typically, an antibody that specifically binds an antigen will have a KD that is 20-, 50-, 100-, 500-, 1000-, 5,000-, 10,000- or more times greater for a control molecule relative to the antigen or epitope.

[0142] Also, specific binding for a particular antigen or an epitope can be exhibited, for example, by an antibody having a KA or Ka for an antigen or epitope of at least 20-, 50-, 100-, 500-, 1000-, 5,000-, 10,000- or more times greater for the epitope relative to a control, where KA or Ka refers to an association rate of a particular antibody-antigen interaction. Binding affinity is generally measured using a Biacore assay or Octet as is known in the art.

[0143] By “parent polypeptide” or “precursor polypeptide” (including Fc parent or precursors) as used herein is meant a polypeptide that is subsequently modified to generate a variant. Said parent polypeptide may be a naturally occurring polypeptide, or a variant or engineered version of a naturally occurring polypeptide. Parent polypeptide may refer to the polypeptide itself, compositions that comprise the parent polypeptide, or the amino acid sequence that encodes it. Accordingly, by “parent Fc polypeptide” as used herein is meant an unmodified Fc polypeptide that is modified to generate a variant, and by “parent antibody” as used herein is meant an unmodified antibody that is modified to generate a variant antibody.

[0144] By “position” as used herein is meant a location in the sequence of a protein. Positions may be numbered sequentially, or according to an established format, for example the EU index for antibody numbering.

[0145] By “target antigen” as used herein is meant the molecule that is bound specifically by the variable region of a given antibody. A target antigen may be a protein, carbohydrate, lipid, or other chemical compound. A range of suitable exemplary target antigens are described herein.

[0146] By “target cell” as used herein is meant a cell that expresses a target antigen. Generally, for the purposes of the invention, target cells are either tumor cells that express TTAs or T cells that express the CD3 antigen.

[0147] By “Fv” or “Fv domain” or “Fv region” as used herein is meant a polypeptide that comprises the VL and VH domains of an antigen binding domain, generally from an antibody. Fv domains usually form an “antigen binding domain” or “ABD” as discussed herein, if they contain active VH and VL domains (although in some cases, an Fv containing a constrained linker is used, such that an active ABD isn't formed prior to cleavage). As discussed below, Fv domains can be organized in a number of ways in the present invention, and can be “active” or “inactive”, such as in a scFv format, a constrained Fv format, a pseudo Fv format, etc. It should be understood that in the present invention, in some cases an Fv domain is made up of a VH and VL domain on a single polypeptide chain, such as shown in FIG. 1 and FIG. 2 but with a constrained linker such that an intramolecular ABD cannot be formed. In these embodiments, it is after cleavage that two active ABDs are formed. In some cases, an Fv domain is made up of a VH and a VL domain, one of which is inert, such that only after cleavage is an intermolecular ABD formed. As discussed below, Fv domains can be organized in a number of ways in the present invention, and can be “active” or “inactive”, such as in a scFv format, a constrained Fv format, a pseudo Fv format, etc. In addition, as discussed herein, Fv domains containing VH and VL can be/form ABDs, and other ABDs that do not contain VH and VL domains can be formed using sdABDs.

[0148] By “variable domain” herein is meant the region of an immunoglobulin that comprises one or more Ig domains substantially encoded by any of the Vx, VW, and/or VH genes that make up the kappa, lambda, and heavy chain immunoglobulin genetic loci respectively. In some cases, a single variable domain, such as a sdFv (also referred to herein as sdABD) can be used.

[0149] In embodiments utilizing both variable heavy (VH) and variable light (VL) domains, each VH and VL is composed of three hypervariable regions (“complementary determining regions,” “CDRs”) and four “framework regions”, or “FRs”, arranged from amino-terminus to carboxy-terminus in the following order: FR1-CDR1-FR2-CDR2-FR3-CDR3-FR4. Thus, the VH domain has the structure vhFR1-vhCDR1-vhFR2-vhCDR2-vhFR3-vhCDR3-vhFR4 and the VL domain has the structure vlFR1-vlCDR1-vlFR2-vlCDR2-vlFR3-vlCDR3-vlFR4. As is more fully described herein, the vhFR regions and the vlFR regions self-assemble to form Fv domains. In general, in the prodrug formats of the invention, there are “constrained Fv domains” wherein the VH and VL domains cannot self associate, and “pseudo Fv domains” for which the CDRs do not form antigen binding domains when self associated.

[0150] The hypervariable regions confer antigen binding specificity and generally encompasses amino acid residues from about amino acid residues 24-34 (LCDR1; “L” denotes light chain), 50-56 (LCDR2) and 89-97 (LCDR3) in the light chain variable region and around about 31-35B (HCDR1; “H” denotes heavy chain), 50-65 (HCDR2), and 95-102 (HCDR3) in the heavy chain variable region; Kabat et al., SEQUENCES OF PROTEINS OF IMMUNOLOGICAL INTEREST, 5th Ed. Public Health Service, National Institutes of Health, Bethesda, Md. (1991) and/or those residues forming a hypervariable loop (e.g. residues 26-32 (LCDR1), 50-52 (LCDR2) and 91-96 (LCDR3) in the light chain variable region and 26-32 (HCDR1), 53-55 (HCDR2) and 96-101 (HCDR3) in the heavy chain variable region; Chothia and Lesk (1987) J. Mol. Biol. 196:901-917. Specific CDRs of the invention are described below.

[0151] As will be appreciated by those in the art, the exact numbering and placement of the CDRs can be different among different numbering systems. However, it should be understood that the disclosure of a variable heavy and/or variable light sequence includes the disclosure of the associated (inherent) CDRs. Accordingly, the disclosure of each variable heavy region is a disclosure of the vhCDRs (e.g. vhCDR1, vhCDR2 and vhCDR3) and the disclosure of each variable light region is a disclosure of the vlCDRs (e.g. vlCDR1, vlCDR2 and vlCDR3).

[0152] A useful comparison of CDR numbering is as below, see Lafranc et al., Dev. Comp. Immunol. 27(1):55-77 (2003):

TABLE 1

| | Kabat+ | | | | | |
|---|---|---|---|---|---|---|
| | Chothia | IMGT | Kabat | AbM | Chothia | Contact |
| vhCDR1 | 26-35 | 27-38 | 31-35 | 26-35 | 26-32 | 30-35 |
| vhCDR2 | 50-65 | 56-65 | 50-65 | 50-58 | 52-56 | 47-58 |
| vhCDR3 | 95-102 | 105-117 | 95-102 | 95-102 | 95-102 | 93-101 |
| vlCDR1 | 24-34 | 27-38 | 24-34 | 24-34 | 24-34 | 30-36 |
| v1CDR2 | 50-56 | 56-65 | 50-56 | 50-56 | 50-56 | 46-55 |
| vlCDR3 | 89-97 | 105-117 | 89-97 | 89-97 | 89-97 | 89-96 |

[0153] Throughout the present specification, the Kabat numbering system is generally used when referring to a residue in the variable domain (approximately, residues 1-107 of the light chain variable region and residues 1-113 of the heavy chain variable region) and the EU numbering system for Fc regions (e.g, Kabat et al., supra (1991)).

[0154] The present invention provides a large number of different CDR sets. In this case, a “full CDR set” in the context of the anti-CD3 component comprises the three variable light and three variable heavy CDRs, e.g. a vlCDR1, vlCDR2, vlCDR3, vhCDR1, vhCDR2 and vhCDR3. As will be appreciated by those in the art, each set of CDRs, the VH and VL CDRs, can bind to antigens, both individually and as a set. For example, in constrained Fv domains, the vhCDRs can bind, for example to CD3 and the vlCDRs can bind to CD3, but in the constrained format they cannot bind to CD3.

[0155] In the context of a single domain ABD (“sdABD”) such as are generally used herein to bind to target tumor antigens (TTA), a CDR set is only three CDRs; these are sometimes referred to in the art as “VHH” domains as well.

[0156] These CDRs can be part of a larger variable light or variable heavy domain, respectfully. In addition, as more fully outlined herein, the variable heavy and variable light domains can be on separate polypeptide chains or on a single polypeptide chain in the case of scFv sequences, depending on the format and configuration of the moieties herein.

[0157] The CDRs contribute to the formation of the antigen-binding, or more specifically, epitope binding sites. “Epitope” refers to a determinant that interacts with a specific antigen binding site in the variable regions known as a paratope. Epitopes are groupings of molecules such as amino acids or sugar side chains and usually have specific structural characteristics, as well as specific charge characteristics. A single antigen may have more than one epitope.

[0158] The epitope may comprise amino acid residues directly involved in the binding (also called immunodominant component of the epitope) and other amino acid residues, which are not directly involved in the binding, such as amino acid residues which are effectively blocked by the specific antigen binding peptide; in other words, the amino acid residue is within the footprint of the specific antigen binding peptide.

[0159] Epitopes may be either conformational or linear. A conformational epitope is produced by spatially juxtaposed amino acids from different segments of the linear polypeptide chain. A linear epitope is one produced by adjacent amino acid residues in a polypeptide chain. Conformational and nonconformational epitopes may be distinguished in that the binding to the former but not the latter is lost in the presence of denaturing solvents.

[0160] An epitope typically includes at least 3, and more usually, at least 5 or 8-10 amino acids in a unique spatial conformation. Antibodies that recognize the same epitope can be verified in a simple immunoassay showing the ability of one antibody to block the binding of another antibody to a target antigen, for example “binning.” As outlined below, the invention not only includes the enumerated antigen binding domains and antibodies herein, but those that compete for binding with the epitopes bound by the enumerated antigen binding domains.

[0161] The variable heavy and variable light domains of the invention can be “active” or “inactive”.

[0162] As used herein, “inactive VH” (“iVH”) and “inactive VL” (“iVL”) refer to components of a pseudo Fv domain, which, when paired with their cognate VL or VH partners, respectively, form a resulting VH/VL pair that does not specifically bind to the antigen to which the “active” VH or “active” VL would bind were it bound to an analogous VL or VH, which was not “inactive”. Exemplary “inactive VH” and “inactive VL” domains are formed by mutation of a wild type VH or VL sequence as more fully outlined below. Exemplary mutations are within CDR1, CDR2 or CDR3 of VH or VL. An exemplary mutation includes placing a domain linker within CDR2, thereby forming an “inactive VH” or “inactive VL” domain. In contrast, an “active VH” or “active VL” is one that, upon pairing with its “active” cognate partner, i.e., VL or VH, respectively, is capable of specifically binding to its target antigen. Thus, it should be understood that a pseudo Fv can be a VH/iVL pair, a iVH/VL pair, or a iVH/iVL pair.

[0163] In contrast, as used herein, the term “active” refers to a CD3 binding domain that is capable of specifically binding to CD3. This term is used in two contexts: (a) when referring to a single member of an Fv binding pair (i.e., VH or VL), which is of a sequence capable of pairing with its cognate partner and specifically binding to CD3; and (b) the pair of cognates (i.e., VH and VL) of a sequence capable of specifically binding to CD−. An exemplary “active” VH, VL or VH/VL pair is a wild type or parent sequence.

[0164] “CD-x” refers to a cluster of differentiation (CD) protein. In exemplary embodiments, CD-x is selected from those CD proteins having a role in the recruitment or activation of T-cells in a subject to whom a polypeptide construct of the invention has been administered. In an exemplary embodiment, CD-x is CD3, the sequence of which is shown in FIG. 7.

[0165] The term “binding domain” characterizes, in connection with the present invention, a domain which (specifically) binds to/interacts with/recognizes a given target epitope or a given target site on the target molecules (antigens), for example: EGFR and CD3, respectively. The structure and function of the target antigen binding domain (recognizing EGFR), and preferably also the structure and/or function of the CD3 binding domain (recognizing CD3), is/are based on the structure and/or function of an antibody, e.g. of a full-length or whole immunoglobulin molecule, including sdABDs. According to the invention, the target antigen binding domain is generally characterized by the presence of three CDRs that bind the target tumor antigen (generally referred to in the art as variable heavy domains, although no corresponding light chain CDRs are present). Alternatively, ABDs to TTAs can include three light chain CDRs (i.e. CDR1, CDR2 and CDR3 of the VL region) and/or three heavy chain CDRs (i.e. CDR1, CDR2 and CDR3 of the VH region). The CD3 binding domain preferably also comprises at least the minimum structural requirements of an antibody which allow for the target binding. More preferably, the CD3 binding domain comprises at least three light chain CDRs (i.e. CDR1, CDR2 and CDR3 of the VL region) and/or three heavy chain CDRs (i.e. CDR1, CDR2 and CDR3 of the VH region). It is envisaged that in exemplary embodiments the target antigen and/or CD3 binding domain is produced by or obtainable by phage-display or library screening methods.

[0166] By “domain” as used herein is meant a protein sequence with a function, as outlined herein. Domains of the invention include tumor target antigen binding domains (TTA domains), variable heavy domains, variable light domains, scFv domains, linker domains, and half life extension domains.

[0167] By “domain linker” herein is meant an amino acid sequence that joins two domains as outlined herein. Domain linkers can be cleavable linkers, constrained cleavable linkers, non-cleavable linkers, constrained non-cleavable linkers, scFv linkers, etc.

[0168] By “cleavable linker” (“CL”) herein is meant an amino acid sequence that can be cleaved by a protease, preferably a human protease in a disease tissue as outlined herein. Cleavable linkers generally are at least 3 amino acids in length, with from 4, 5, 6, 7, 8, 9, 10, 11, 12, 13, 14, 15 or more amino acids finding use in the invention, depending on the required flexibility. A number of cleavable linker sequences are found in FIG. 6 and FIG. 7.

[0169] By “non cleavable linker” (“NCL”) herein is meant an amino acid sequence that cannot be cleaved by a human protease under normal physiological conditions.

[0170] By “constrained cleavable linker” (“CCL”) herein is meant a short polypeptide that contains a protease cleavage site (as defined herein) that joins two domains as outlined herein in such a manner that the two domains cannot significantly interact with each other until after they reside on different polypeptide chains, e.g. after cleavage. When the CCL joins a VH and a VL domain as defined herein, the VH and VL cannot self-assemble to form a functional Fv prior to cleavage due to steric constraints in an intramolecular way (although they may assemble into pseudo Fv domains in an intermolecular way). Upon cleavage by the relevant protease, the VH and VL can assemble to form an active antigen binding domain in an intermolecular way. In general, CCLs are less than 10 amino acids in length, with 9, 8, 7, 6, 5 and 4 amino acids finding use in the invention. In general, protease cleavage sites generally are at least 4+ amino acids in length to confer sufficient specificity, as is shown in FIG. 6.

[0171] By “constrained non-cleavable linker” (“CNCL”) herein is meant a short polypeptide that that joins two domains as outlined herein in such a manner that the two domains cannot significantly interact with each other, and that is not significantly cleaved by human proteases under physiological conditions.

[0172] By “constrained Fv domain” herein is meant an Fv domain that comprises an active variable heavy domain and an active variable light domain, linked covalently with a constrained linker as outlined herein, in such a way that the active heavy and light variable domains cannot intramolecularly interact to form an active Fv that will bind an antigen such as CD3. Thus, a constrained Fv domain is one that is similar to an scFv but is not able to bind an antigen due to the presence of a constrained linker (although they may assemble intermolecularly with inert variable domains to form pseudo Fv domains).

[0173] By “pseudo Fv domain” herein is meant a domain that comprises a pseudo or inactive variable heavy domain or a pseudo or inactive variable light domain, or both, linked using a domain linker (which can be cleavable, constrained, non-cleavable, non-constrained, etc.). The iVH and iVL domains of a pseudo Fv domain do not bind to a human antigen when either associated with each other (iVH/iVL) or when associated with an active VH or VL; thus iVH/iVL, iVH/VL and iVL/VH Fv domains do not appreciably bind to a human protein, such that these domains are inert in the human body.

[0174] By “single chain Fv” or “scFv” herein is meant a variable heavy (VH) domain covalently attached to a variable light (VL) domain, generally using a domain linker as discussed herein, to form a scFv or scFv domain. A scFv domain can be in either orientation from N- to C-terminus (VH-linker-VL or VL-linker-VH).

[0175] By “single domain Fv”, “sdFv” or “sdABD” herein is meant an antigen binding domain that only has three CDRs, generally based on camelid antibody technology. See: Protein Engineering 9(7):1129-35 (1994); Rev Mol Biotech 74:277-302 (2001); Ann Rev Biochem 82:775-97 (2013). As outlined herein, there are two general types of sdABDs used herein: sdABDs that bind to TTAs, and are annotated as such (sdABD-TTA for the generic term, or sdABD-EGFR for one that binds to EGFR, sdABD-FOLR1 for one that binds to FOLR1, etc.) and sdABDs that bind to HSA (“sdABD-HSA” or “sdABD(½)”.

[0176] By “protease cleavage site” refers to the amino acid sequence recognized and cleaved by a protease. Suitable protease cleavage sites are outlined below and shown in FIG. 7 and FIG. 6.

[0177] As used herein, “protease cleavage domain” refers to the peptide sequence incorporating the “protease cleavage site” and any linkers between individual protease cleavage sites and between the protease cleavage site(s) and the other functional components of the constructs of the invention (e.g., V_{H}, V_{L}, iVH, iVL, target antigen binding domain(s), half-life extension domain, etc.). As outlined herein, a protease cleavage domain may also include additional amino acids if necessary, for example to confer flexibility.

[0178] The term “COBRA™” and “conditional bispecific redirected activation” refers to a bispecific conditionally effective protein that has a number of functional protein domains. In some embodiments, one of the functional domains is an antigen binding domain (ABD) that binds a target tumor antigen (TTA). In certain embodiments, another domain is an ABD that binds to a T cell antigen under certain conditions. The T cell antigen includes but is not limited to CD3. The term “hemi-COBRA™” refers to a conditionally effective protein that can bind a T cell antigen when a variable heavy chain of a hemi-COBRA can associate to a variable light chain of another hemi-COBRA™ (a complementary hemi-COBRA™) due to innate self-assembly when concentrated on the surface of a target expressing cell.

### Detailed Description of the Embodiments

### I. Fusion Proteins of the Invention

[0179] The fusion proteins of the invention have a number of different components, generally referred to herein as domains that are linked together in a variety of ways. Some of the domains are binding domains, that each bind to a target antigen (e.g. a TTA or CD3, for example). As they bind to more than one antigen, they are referred to herein as “multispecific”; for example, a prodrug construct of the invention may bind to a TTA and CD3, and thus are “bispecific”. A protein can also have higher specificities; for example, if the first αTTA binds to EGFR, the second to EpCAM and there is an anti-CD3 binding domain, this would be a “trispecific” molecule. Similarly, the addition of an anti-HSA binding domain to this construct would be “tetraspecific”, as shown in FIG. 3B.

[0180] As will be appreciated by those in the art, the proteins of the invention can have different valencies as well as be multispecific. That is, proteins of the invention can bind a target with more than one binding site; for example, Pro186 is bivalent for EGFR.

[0181] The proteins of the invention can include CD3 antigen binding domains arranged in a variety of ways as outlined herein, tumor target antigen binding domains, half-life extension domains, linkers, etc.

[0182] A. CD3 Antigen Binding Domains

[0183] The specificity of the response of T cells is mediated by the recognition of antigen (displayed in context of a major histocompatibility complex, MHC) by the T cell receptor complex. As part of the T cell receptor complex, CD3 is a protein complex that includes a CD3γ (gamma) chain, a CD3δ (delta) chain, two CD3e (epsilon) chains and two CD3ζ (zeta) chains, which are present at the cell surface. CD3 molecules associate with the α (alpha) and β (beta) chains of the T cell receptor (TCR) to comprise the TCR complex. Clustering of CD3 on T cells, such as by Fv domains that bind to CD3 leads to T cell activation similar to the engagement of the T cell receptor but independent of its clonal-typical specificity.

[0184] However, as is known in the art, CD3 activation can cause a number of toxic side effects, and accordingly the present invention is directed to providing active CD3 binding of the polypeptides of the invention only in the presence of tumor cells, where specific proteases are found, that then cleave the prodrug polypeptides of the invention to provide an active CD3 binding domain. Thus, in the present invention, binding of an anti-CD3 Fv domain to CD3 is regulated by a protease cleavage domain which restricts binding of the CD3 Fv domain to CD3 only in the microenvironment of a diseased cell or tissue with elevated levels of proteases, for example in a tumor microenvironment as is described herein.

[0185] Accordingly, the present invention provides two sets of VH and VL domains, an active set (VH and VL) and an inactive set (inactive VH and inactive VL; also referred to as “iVH” and “iVL”, respectively) with all four being present in the prodrug construct. The construct is formatted such that the VH and VL set cannot self-associate, but rather associates with an inactive partner, e.g. iVH and VL and iVL and VH as is shown herein.

[0186] 1. Active Anti-CD3 Variable Heavy and Variable Light Domains

[0187] There are a number of suitable active CDR sets, and/or VH and VL domains, that are known in the art that find use in the present invention. For example, the CDRs and/or VH and VL domains are derived from known anti-CD3 antibodies, such as, for example, muromonab-CD3 (OKT3), otelixizumab (TRX4), teplizumab (MGA031), visilizumab (Nuvion), SP34 or I2C, TR-66 or X35-3, VIT3, BMA030 (BW264/56), CLB-T3/3, CRIS7, YTH12.5, F111-409, CLB-T3.4.2, TR-66, WT32, SPv-T3b, 11D8, XIII-141, XIII-46, XIII-87, 12F6, T3/RW2-8C8, T3/RW2-4B6, OKT3D, M-T301, SMC2, F101.01, UCHT-1 and WT-31.

[0188] In one embodiment, the VH and VL sequences that form an active Fv domain that binds to human CD3 are shown in FIGS. 7A-7B. As is shown herein, these active VH (“aVH”) and active VL (“aVL”) domains can be used in different configurations and Formats 1, 2, 3 and 4.

[0189] 2. Inactive Anti-CD3 Variable Heavy and Variable Light Domains

[0190] The inactive iVH and iVL domains contain “regular” framework regions (FRs) that allow association, such that an inactive variable domain will associate with an active variable domain, rendering the pair inactive, e.g. unable to bind CD3.

[0191] As will be appreciated by those in the art, there are a number of “inactive” variable domains that find use in the invention. Basically, any variable domain with human framework regions that allows self-assembly with another variable domain, no matter what amino acids are in the CDR location in the variable region, can be used. For clarity, the inactive domains are said to include CDRs, although technically the inactive variable domains do not confer binding capabilities.

[0192] As will be appreciated in the art, it is generally straightforward to generate inactive VH or VL domains, and can be done in a variety of ways. In some embodiments, the generation of inactive variable domains is generally done by altering one or more of the CDRs of an active Fv, including making changes in one or more of the three CDRs of an active variable domain. This can be done by making one or more amino acid substitutions at functionally important residues in one or more CDRs, replacing some or all CDR residues with random sequences, replacing one or more CDRs with tag or flag sequences, and/or swapping CDRs and/or variable regions with those from an irrelevant antibody (one directed to a different organism's protein for example.

[0193] In some cases, only one of the CDRs in a variable region can be altered to render it inactive, although other embodiments include alterations in one, two, three, four, five or six CDRs.

[0194] In some cases, the inactive domains can be engineered to promote selective binding in the prodrug format, to encourage formation of intramolecular iVH-VL and VH-iVL domains prior to cleavage (over, for example, intermolecular pair formation). See for example Igawa et al., Protein Eng. Des. Selection 23(8):667-677 (2010), hereby expressly incorporated by reference in its entirety and specifically for the interface residue amino acid substitutions.

[0195] In certain embodiments, the CD3 binding domain of the polypeptide constructs described herein exhibit not only potent CD3 binding affinities with human CD3, but show also excellent cross reactivity with the respective cynomolgus monkey CD3 proteins. In some instances, the CD3 binding domain of the polypeptide constructs is cross-reactive with CD3 from cynomolgus monkey. In certain instances, human:cynomolgous KD ratios for CD3 are between 5 and 0.2.

[0196] In some embodiments, the CD3 binding domain of the antigen binding protein can be any domain that binds to CD3 including but not limited to domains from a monoclonal antibody, a polyclonal antibody, a recombinant antibody, a human antibody, a humanized antibody. In some instances, it is beneficial for the CD3 binding domain to be derived from the same species in which the antigen binding protein will ultimately be used in. For example, for use in humans, it may be beneficial for the CD3 binding domain of the antigen binding protein to comprise human or humanized residues from the antigen binding domain of an antibody or antibody fragment.

[0197] Thus, in one aspect, the antigen-binding domain comprises a humanized or human binding domain. In one embodiment, the humanized or human anti-CD3 binding domain comprises one or more (e.g., all three) light chain complementary determining region 1 (LC CDR1), light chain complementary determining region 2 (LC CDR2), and light chain complementary determining region 3 (LC CDR3) of a humanized or human anti-CD3 binding domain described herein, and/or one or more (e.g., all three) heavy chain complementary determining region 1 (HC CDR1), heavy chain complementary determining region 2 (HC CDR2), and heavy chain complementary determining region 3 (HC CDR3) of a humanized or human anti-CD3 binding domain described herein, e.g., a humanized or human anti-CD3 binding domain comprising one or more, e.g., all three, LC CDRs and one or more, e.g., all three, HC CDRs.

[0198] In some embodiments, the humanized or human anti-CD3 binding domain comprises a humanized or human light chain variable region specific to CD3 where the light chain variable region specific to CD3 comprises human or non-human light chain CDRs in a human light chain framework region. In certain instances, the light chain framework region is a λ (lambda) light chain framework. In other instances, the light chain framework region is a κ (kappa) light chain framework.

[0199] In some embodiments, one or more CD3 binding domains are humanized or fully human. In some embodiments, one or more activated CD3 binding domains have a KD binding of 1000 nM or less to CD3 on CD3 expressing cells. In some embodiments, one or more activated CD3 binding domains have a KD binding of 100 nM or less to CD3 on CD3 expressing cells. In some embodiments, one or more activated CD3 binding domains have a KD binding of 10 nM or less to CD3 on CD3 expressing cells. In some embodiments, one or more CD3 binding domains have crossreactivity with cynomolgus CD3. In some embodiments, one or more CD3 binding domains comprise an amino acid sequence provided herein.

[0200] In some embodiments, the humanized or human anti-CD3 binding domain comprises a humanized or human heavy chain variable region specific to CD3 where the heavy chain variable region specific to CD3 comprises human or non-human heavy chain CDRs in a human heavy chain framework region.

[0201] In one embodiment, the anti-CD3 binding domain is an Fv comprising a light chain and a heavy chain of an amino acid sequence provided herein. In an embodiment, the anti-CD3 binding domain comprises: a light chain variable region comprising an amino acid sequence having at least one, two or three modifications (e.g., substitutions) but not more than 30, 20 or 10 modifications (e.g., substitutions) of an amino acid sequence of a light chain variable region provided herein, or a sequence with 95-99% identity with an amino acid sequence provided herein; and/or a heavy chain variable region comprising an amino acid sequence having at least one, two or three modifications (e.g., substitutions) but not more than 30, 20 or 10 modifications (e.g., substitutions) of an amino acid sequence of a heavy chain variable region provided herein, or a sequence with 95-99% identity to an amino acid sequence provided herein. In one embodiment, the humanized or human anti-CD3 binding domain is a scFv, and a light chain variable region comprising an amino acid sequence described herein, is attached to a heavy chain variable region comprising an amino acid sequence described herein, via a scFv linker. The light chain variable region and heavy chain variable region of a scFv can be, e.g., in any of the following orientations: light chain variable region-scFv linker-heavy chain variable region or heavy chain variable region-scFv linker-light chain variable region.

[0202] In some embodiments, CD3 binding domain of an antigen binding protein has an affinity to CD3 on CD3 expressing cells with a KD of 1000 nM or less, 100 nM or less, 50 nM or less, 20 nM or less, 10 nM or less, 5 nM or less, 1 nM or less, or 0.5 nM or less. In some embodiments, the CD3 binding domain of an antigen binding protein has an affinity to CD3ε with a KD of 1000 nM or less, 100 nM or less, 50 nM or less, 20 nM or less, 10 nM or less, 5 nM or less, 1 nM or less, or 0.5 nM or less. In further embodiments, CD3 binding domain of an antigen binding protein has low affinity to CD3, i.e., about 100 nM or greater.

[0203] The affinity to bind to CD3 can be determined, for example, by the ability of the antigen binding protein itself or its CD3 binding domain to bind to CD3 coated on an assay plate; displayed on a microbial cell surface; in solution; etc., as is known in the art, generally using Biacore or Octet assays. The binding activity of the antigen binding protein itself or its CD3 binding domain of the present disclosure to CD3 can be assayed by immobilizing the ligand (e.g., CD3) or the antigen binding protein itself or its CD3 binding domain, to a bead, substrate, cell, etc. Agents can be added in an appropriate buffer and the binding partners incubated for a period of time at a given temperature. After washes to remove unbound material, the bound protein can be released with, for example, SDS, buffers with a high pH, and the like and analyzed, for example, by Surface Plasmon Resonance (SPR).

[0204] In many embodiments, preferred active and inert binding domains are those shown in FIG. 7. FIG. 7 depicts one active VH and VL and three inactive VHi and three inactive VLis that have been inactivated in different ways.

[0205] As shown in FIG. 7, a particularly useful pair of active anti-CD3 VL and VH domains has a VL with a vlCDR1 with SEQ ID NO:255, a vlCDR2 with SEQ ID NO:256 and a vlCDR3 with SEQ ID NO:257 and a VH with a vhCDR1 with SEQ ID NO:271, a vhCDR2 with SEQ ID NO:272 and a vhCDR3 with SEQ ID NO:273.

[0206] As shown in FIG. 7, a particularly useful pair of active anti-CD3 VL and VH domains has a VL with SEQ ID NO:254 and a VH with SEQ ID NO:270.

[0207] B. Antigen Binding Domains to Tumor Target Antigens

[0208] In addition to the described CD3 and half-life extension domains, the polypeptide constructs described herein also comprise target domains that bind to one or more target antigens or one or more regions on a single target antigen. It is contemplated herein that a polypeptide construct of the invention is cleaved, for example, in a disease-specific microenvironment or in the blood of a subject at the protease cleavage domain and that each target antigen binding domain will bind to a target antigen on a target cell, thereby activating the CD3 binding domain to bind a T cell. In general, the TTA binding domains can bind to their targets before protease cleavage, so they can “wait” on the target cell to be activated as T-cell engagers. At least one target antigen is involved in and/or associated with a disease, disorder or condition. Exemplary target antigens include those associated with a proliferative disease, a tumorous disease, an inflammatory disease, an immunological disorder, an autoimmune disease, an infectious disease, a viral disease, an allergic reaction, a parasitic reaction, a graft-versus-host disease or a host-versus-graft disease. In some embodiments, a target antigen is a tumor antigen expressed on a tumor cell. Alternatively, in some embodiments, a target antigen is associated with a pathogen such as a virus or bacterium. At least one target antigen may also be directed against healthy tissue.

[0209] In some embodiments, a target antigen is a cell surface molecule such as a protein, lipid or polysaccharide. In some embodiments, a target antigen is a on a tumor cell, virally infected cell, bacterially infected cell, damaged red blood cell, arterial plaque cell, or fibrotic tissue cell.

[0210] Preferred embodiments of the invention utilize sdABDs as the targeting domains. These are preferred over scFv ABDs, since the addition of other VH and VL domains into a construct of the invention may complicate the formation of pseudo Fv domains.

[0211] In some embodiments, the pro-drug constructs of the invention utilize a single TTA binding domain, such as generally depicted in FIG. 3A, as pairs of sdABD-TTAs, and FIG. 4, as a “format 4” configuration. FIG. 4 shows the use of a single anti-EGFR ABD, although other TTA binding domains can be used.

[0212] In some embodiments, particularly in the Format 1 and Format 2 constructs, the pro-drug constructs of the invention utilize two TTA ABDs, again preferably in the sdABD-TTA format. When dual targeting domains are used, they can bind to the same epitope of the same TTA. For example, as discussed herein, many of the constructs herein utilize two identical targeting domains. In some embodiments, two targeting domains can be used that bind to different epitopes of the same TTA, for example as shown in FIG. 7, the two EGFR sdABDs bind to different epitopes on human EGFR. In some embodiments, the two targeting domains bind to different TTAs as more fully described below.

[0213] Polypeptide constructs contemplated herein include at least one antigen binding domain, wherein the antigen binding domain binds to at least one target antigen. In some embodiments, the target antigen binding domains specifically bind to a cell surface molecule. In some embodiments, the target antigen binding domains specifically bind to a tumor antigen. In some embodiments, the target antigen binding domains specifically and independently bind to a tumor target antigen (“TTA”) selected from at least one of EpCAM, EGFR, HER-2, LyPD3, B7H3, CA9, Trop2 and FOLR1. As discussed below, these can be combined in a variety of ways.

[0214] (a) EGFR sdABDs

[0215] As shown in FIG. 5A, there are a number of particularly useful sdABDs that binding to human EGFR, referred to herein as “aEGFR”, “aEGFR”, “sdABD-EGFR”, “EGFR sdABDs”, “EGFR sdAbs”, “EGFR ABDs” or “EGFRABDs”.

[0216] In some embodiments, the sdABD-EGFR (e.g., sdABD-αEGFR1) has a sdCDR1 with SEQ ID NO:2 a sdCDR2 with SEQ ID NO:3 and a sdCDR3 with SEQ ID NO:4. In some cases, the sdABD-EGFR has the amino acid sequence of SEQ ID NO:1, as provided in FIG. 5A.

[0217] In some embodiments, the sdABD-EGFR (e.g., sdABD-αEGFR2) has a sdCDR1 with SEQ ID NO:6, a sdCDR2 with SEQ ID NO:7 and a sdCDR3 with SEQ ID NO:8. In some cases, the sdABD-EGFR has the amino acid sequence of SEQ ID NO:5, as provided in FIG. 5A.

[0218] In some embodiments, the sdABD-EGFR (e.g., sdABD-hαEGFR1) has a sdCDR1 with SEQ ID NO:10, a sdCDR2 with SEQ ID NO:11 and a sdCDR3 with SEQ ID NO:12. In some cases, the sdABD-EGFR has the amino acid sequence of SEQ ID NO:9, as provided in FIG. 5A.

[0219] In some embodiments, the sdABD-EGFR (e.g., sdABD-αEGFR2a) has a sdCDR1 with SEQ ID NO:14, a sdCDR2 with SEQ ID NO:15 and a sdCDR3 with SEQ ID NO:16. In some cases, the sdABD-EGFR has the amino acid sequence of SEQ ID NO: 13, as provided in FIG. 5A.

[0220] In some embodiments, the sdABD-EGFR (e.g., sdABD-hαEGFR2d) has a sdCDR1 with SEQ ID NO:18, a sdCDR2 with SEQ ID NO:19 and a sdCDR3 with SEQ ID NO:20. In some cases, the sdABD-EGFR has the amino acid sequence of SEQ ID NO: 17, as provided in FIG. 5A.

[0221] (b) EpCAM sdABDs

[0222] As shown in FIGS. 5D-5E, there are a number of particularly useful sdABDs that binding to human EpCAM, referred to herein as “αEpCAM”, “aEpCAM”, “sdABD-EpCAM”, EpCAM sdABDs”, “EpCAM sdAbs”, “EpCAM ABDs” or “EpCAMABDs”.

[0223] In some embodiments, the sdABD-EpCAM (e.g., sdABD-EpCAM h13) has a sdCDR1 with SEQ ID NO:62, a sdCDR2 with SEQ ID NO:63, a sdCDR3 with SEQ ID NO:64. In some cases, the sdABD-EpCAM has the amino acid sequence of SEQ ID NO:61, as provided in FIG. 5D.

[0224] In some embodiments, the sdABD-EpCAM (e.g., sdABD-EpCAM h23) has a sdCDR1 with SEQ ID NO:66, a sdCDR2 with SEQ ID NO:67, a sdCDR3 with SEQ ID NO:68. In some cases, the sdABD-EpCAM has the amino acid sequence of SEQ ID NO:65, as provided in FIG. 5D.

[0225] In some embodiments, the sdABD-EpCAM (e.g., sdABD-EpCAM hVIB665) has a sdCDR1 with SEQ ID NO:70, a sdCDR2 with SEQ ID NO:71, a sdCDR3 with SEQ ID NO:72. In some cases, the sdABD-EpCAM has the amino acid sequence of SEQ ID NO:69, as provided in FIG. 5E. It should be noted that in contrast to the h13 and h23 EpCAM sdABDs, hVIB665 (also referred to as “acEpCAM hVIB665”) binds to both the cleaved and uncleaved form of EpCAM (which is known to undergo a cleavage in vivo).

[0226] In some embodiments, the sdABD-EpCAM (e.g., sdABD-EpCAM hVIB666) has a sdCDR1 with SEQ ID NO:74, a sdCDR2 with SEQ ID NO:75, a sdCDR3 with SEQ ID NO:76. In some cases, the sdABD-EpCAM has the amino acid sequence of SEQ ID NO:73, as provided in FIG. 5E. It should be noted that in contrast to the h13 and h23 EpCAM sdABDs, hVIB666 (also referred to as “acEpCAM hVIB666”) binds to both the cleaved and uncleaved form of EpCAM (which is known to undergo a cleavage in vivo).

[0227] In some embodiments, the sdABD-EpCAM (e.g., humanized a EpCAM sdAb) has a sdCDR1 with SEQ ID NO:496, a sdCDR2 with SEQ ID NO:497, a sdCDR3 with SEQ ID NO:498. In some cases, the sdABD-EpCAM has the amino acid sequence of SEQ ID NO:495, as provided in FIG. 75.

[0228] (c) B7H3 sdABDs

[0229] As shown in FIGS. 5B-5D, there are a number of particularly useful sdABDs that binding to human B7H3, referred to herein as “αB7H3”, “aB7H3”, “sdABD-B7H3”, “B7H3 sdAbs”, “B7H3 ABDs”, “B7H3ABDs” or “B7H3-ABDs”.

[0230] In one useful embodiment, the sdABD-B7H3 (e.g., sdABD-B7H3 hF7) has a sdCDR1 with SEQ ID NO:34, a sdCDR2 with SEQ ID NO:35, a sdCDR3 with SEQ ID NO:36. In some cases, the sdABD-B7H3 has the amino acid sequence of SEQ ID NO:33, as provided as FIG. 5B.

[0231] In one useful embodiment, the sdABD-B7H3 (e.g., sdABD-B7H3 hF12) has a sdCDR1 with SEQ ID NO:38, a sdCDR2 with SEQ ID NO:39, a sdCDR3 with SEQ ID NO:40. In some cases, the sdABD-B7H3 has the amino acid sequence of SEQ ID NO:37, as provided as FIG. 5C.

[0232] In one useful embodiment, the sdABD-B7H3 (e.g., sdABD-B7H3 hF12 (N57Q)) has a sdCDR1 with SEQ ID NO:42, a sdCDR2 with SEQ ID NO:43, a sdCDR3 with SEQ ID NO:44. IN some cases, the sdABD-B7H3 has the amino acid sequence of SEQ ID NO:41, as provided as FIG. 5C. In contrast to the hF7 and hF12 B7H3 sdABDs, the amino acid substitution N57Q removes a glycosylation site.

[0233] In one useful embodiment, the sdABD-B7H3 (e.g., sdABD-B7H3 HF12 (N57E)) has a sdCDR1 with SEQ ID NO:46, a sdCDR2 with SEQ ID NO:47, and a sdCDR3 with SEQ ID NO:48. In some cases, the sdABD-B7H3 has the amino acid sequence of SEQ ID NO:45, as provided as FIG. 5C. In contrast to the hF7 and hF12 B7H3 sdABDs, the amino acid substitution N57E removes a glycosylation site.

[0234] In one useful embodiment, the sdABD-B7H3 (e.g., sdABD-B7H3 hF12 (N57D)) has a sdCDR1 with SEQ ID NO:50, a sdCDR2 with SEQ ID NO:51, a sdCDR3 with SEQ ID NO:52. In some cases, the sdABD-B7H3 has the amino acid sequence of SEQ ID NO:49, as provided as FIG. 5B. In contrast to the hF7 and hF12 B7H3 sdABDs, the amino acid substitution N57D removes a glycosylation site.

[0235] In one useful embodiment, the sdABD-B7H3 (e.g., sdABD-B7H3 hF12(S59A)) has a sdCDR1 with SEQ ID NO:54, a sdCDR2 with SEQ ID NO:55, a sdCDR3 with SEQ ID NO:56. IN some cases, the sdABD-B7H3 has the amino acid sequence of SEQ ID NO:53, as provided as FIG. 5D. In contrast to the hF7 and hF12 B7H3 sdABDs, the amino acid substitution S59A removes a glycosylation site.

[0236] In one useful embodiment, the sdABD-B7H3 (e.g., sdABD-B7H3 hF12 (S59Y)) has a sdCDR1 with SEQ ID NO:58, a sdCDR2 with SEQ ID NO:59, a sdCDR3 with SEQ ID NO:60. IN some cases, the sdABD-B7H3 has the amino acid sequence of SEQ ID NO:57, as provided as FIG. 5D. In contrast to the hF7 and hF12 B7H3 sdABDs, the amino acid substitution NS59Y removes a glycosylation site.

[0237] (d) FOLR1 sdABDs

[0238] As shown in FIG. 5B, there are a number of particularly useful sdABDs that binding to human FOLR1, referred to herein as “αFOLR1”, “aFOLR1”, “sdABD-FOLR1”, “FOLR1 sdAbs”, “sdABDs FOLR1”, “FOLR1 ABDs”, “FOLR1ABDs” or “FOLR1-ABDs”.

[0239] In one useful embodiment, the sdABD-FOLR1 (e.g., sdABD-FOLR1 h77-2) has a sdCDR1 with SEQ ID NO:22, a sdCDR2 with SEQ ID NO:23, a sdCDR3 with SEQ ID NO:24. In some cases, the sdABD-FOLR1 has the amino acid sequence of SEQ ID NO:21, as provided in FIG. 5B.

[0240] In one useful embodiment, the sdABD-FOLR1 (e.g., sdABD-FOLR1 h59.3) has a sdCDR1 with SEQ ID NO:26, a sdCDR2 with SEQ ID NO:27, a sdCDR3 with SEQ ID NO:28. In some cases, the sdABD-FOLR1 has the amino acid sequence of SEQ ID NO:25, as provided in FIG. 5B.

[0241] In one useful embodiment, the sdABD-FOLR1 (e.g., sdABD-FOLR1 h22-4) has a sdCDR1 with SEQ ID NO:30, a sdCDR2 with SEQ ID NO:31, a sdCDR3 with SEQ ID NO:32. In some cases, the sdABD-FOLR1 has the amino acid sequence of SEQ ID NO:29, as provided in FIG. 5B.

[0242] (e) Trop2 sdABDs

[0243] As shown in FIG. 5E, there are a number of particularly useful sdABDs that binding to human Trop2, referred to herein as “αTrop2”, “aTrop2”, “sdABD-Trop2”, “sdABDs Trop2”, “Trop2 sdAbs”, “Trop2ABDs” or “Trop2-ABDs”.

[0244] In one useful embodiment, the sdABD-Trop2 (e.g., sdABD-Trop2 hVIB557) has a sdCDR1 with SEQ ID NO:78, a sdCDR2 with SEQ ID NO:79, a sdCDR3 with SEQ ID NO:80. In some cases, the sdABD-Trop2 has the amino acid sequence of SEQ ID NO:77, as provided in FIG. 5E.

[0245] In some embodiments, the sdABD-Trop2 (e.g., sdABD-Trop2 hVIB565) has a sdCDR1 with SEQ ID NO:82, a sdCDR2 with SEQ ID NO:83, a sdCDR3 with SEQ ID NO:84. In some cases, the sdABD-Trop2 has the amino acid sequence of SEQ ID NO:81, as provided in FIG. 5E.

[0246] In some embodiments, the sdABD-Trop2 (e.g., sdABD-Trop2 hVIB575) has a sdCDR1 with SEQ ID NO:86, a sdCDR2 with SEQ ID NO:87, a sdCDR3 with SEQ ID NO:88. In some cases, the sdABD-Trop2 has the amino acid sequence of SEQ ID NO:85, as provided in FIG. 5F.

[0247] In some embodiments, the sdABD-Trop2 (e.g., sdABD-Trop2 hVIB578) has a sdCDR1 with SEQ ID NO:90, a sdCDR2 with SEQ ID NO:91, a sdCDR3 with SEQ ID NO:92. In some cases, the sdABD-Trop2 has the amino acid sequence of SEQ ID NO:89, as provided in FIG. 5F.

[0248] In some embodiments, the sdABD-Trop2 (e.g., sdABD-Trop2 hVIB609) has a sdCDR1 with SEQ ID NO:94, a sdCDR2 with SEQ ID NO:95, a sdCDR3 with SEQ ID NO:96. In some cases, the sdABD-Trop2 has the amino acid sequence of SEQ ID NO:93, as provided in FIG. 5F.

[0249] In some embodiments, the sdABD-Trop2 (e.g., sdABD-Trop2 hVIB619) has a sdCDR1 with SEQ ID NO:98, a sdCDR2 with SEQ ID NO:99, a sdCDR3 with SEQ ID NO:100. In some cases, the sdABD-Trop2 has the amino acid sequence of SEQ ID NO:97, as provided in FIG. 5F.

[0250] (f) CA9 sdABDs

[0251] As shown in FIGS. 5F-5G, there are a number of particularly useful sdABDs that binding to human CA9, referred to herein as “αCA9”, “aCA9”, “sdABD-CA9”, “sdABDs CA9”, “CA9 sdAbs”, “CA9 ABDs” or “CA9-ABDs”.

[0252] In some embodiments, the sdABD-CA9 (e.g., sdABD-CA9 hVIB456) has a sdCDR1 with SEQ ID NO:102, a sdCDR2 with SEQ ID NO: 103, a sdCDR3 with SEQ ID NO:104. In some cases, the sdABD-Trop2 has the amino acid sequence of SEQ ID NO:101, as provided in FIG. 5F.

[0253] In some embodiments, the sdABD-CA9 (e.g., sdABD-CA9 hVIB476) has a sdCDR1 with SEQ ID NO:106, a sdCDR2 with SEQ ID NO:107, a sdCDR3 with SEQ ID NO:108. In some cases, the sdABD-Trop2 has the amino acid sequence of SEQ ID NO:105, as provided in FIG. 5G.

[0254] In some embodiments, the sdABD-CA9 (e.g., sdABD-CA9 hVIB407) has a sdCDR1 with SEQ ID NO:110, a sdCDR2 with SEQ ID NO:111, a sdCDR3 with SEQ ID NO:112. IN some cases, the sdABD-Trop2 has the amino acid sequence of SEQ ID NO:109, as provided in FIG. 5G.

[0255] In some embodiments, the sdABD-CA9 (e.g., sdABD-CA9 hVIB445) has a sdCDR1 with SEQ ID NO:114, a sdCDR2 with SEQ ID NO:115, a sdCDR3 with SEQ ID NO:116. In some cases, the sdABD-Trop2 has the amino acid sequence of SEQ ID NO:113, as provided in FIG. 5G.

[0256] (g) LyPD3 sdABDs

[0257] As shown in FIGS. 5G-5H, there are a number of particularly useful sdABDs that binding to human LyPD3, referred to herein as “αLyPD3”, “sdABD-LyPD3”, “sdABDs LyPD3”, “LyPD3 sdAbs”, “LyPD3 ABDs”, “LyPD3ABDs” or “LyPD3-ABDs”.

[0258] In one useful embodiment, the sdABD-LyPD3 (e.g., sdABD-LyPD3 h787) has a sdCDR1 with SEQ ID NO:118, a sdCDR2 with SEQ ID NO:119, a sdCDR3 with SEQ ID NO:120. In some cases, the sdABD-LyPD3 has the amino acid sequence of SEQ ID NO:117, as provided in FIG. 5G.

[0259] In one useful embodiment, the sdABD-LyPD3 (e.g., sdABD-LyPD3 h790) has a sdCDR1 with SEQ ID NO:122, a sdCDR2 with SEQ ID NO:123, a sdCDR3 with SEQ ID NO:124. In some cases, the sdABD-LyPD3 has the amino acid sequence of SEQ ID NO:121, as provided in FIG. 5G.

[0260] In one useful embodiment, the sdABD-LyPD3 (e.g., sdABD-LyPD3 H804) has a sdCDR1 with SEQ ID NO:126, a sdCDR2 with SEQ ID NO:127, a sdCDR3 with SEQ ID NO:128. In some cases, the sdABD-LyPD3 has the amino acid sequence of SEQ ID NO:125, as provided in FIG. 5H.

[0261] In one useful embodiment, the sdABD-LyPD3 (e.g., sdABD-LyPD3 h773) has a sdCDR1 with SEQ ID NO:130, a sdCDR2 with SEQ ID NO:131, a sdCDR3 with SEQ ID NO:132. In some cases, the sdABD-LyPD3 has the amino acid sequence of SEQ ID NO:129, as provided in FIG. 5H.

[0262] In one useful embodiment, the sdABD-LyPD3 (e.g., sdABD-LyPD3 h840) has a sdCDR1 with SEQ ID NO:134, a sdCDR2 with SEQ ID NO:135, a sdCDR3 with SEQ ID NO:136. In some cases, the sdABD-LyPD3 has the amino acid sequence of SEQ ID NO:133, as provided in FIG. 5H.

[0263] In one useful embodiment, the sdABD-LyPD3 (e.g., sdABD-LyPD3 h885) has a sdCDR1 with SEQ ID NO:138, a sdCDR2 with SEQ ID NO:139, a sdCDR3 with SEQ ID NO:140. In some cases, the sdABD-LyPD3 has the amino acid sequence of SEQ ID NO:137, as provided in FIG. 5H.

[0264] (h) HER2 sdABDs

[0265] As shown in FIGS. 5H-5M, there are a number of particularly useful sdABDs that binding to human HER2, referred to herein as “αHER2”, “aHER2”, “sdABD-HER2”, “sdABDs HER2”, “HER2 sdAbs”, “HER2 ABDs”, “HER2ABDs” or “HER2-ABDs”.

[0266] In some embodiments, the sdABD-HER2 (e.g., sdABD-HER2 1054) has a sdCDR1 with SEQ ID NO:142, a sdCDR2 with SEQ ID NO: 143, a sdCDR3 with SEQ ID NO:144. In some cases, the sdABD-HER2 has the amino acid sequence of SEQ ID NO:141, as provided in FIG. 5H.

[0267] In some embodiments, the sdABD-HER2 (e.g., sdABD-HER2 1055) has a sdCDR1 with SEQ ID NO:146, a sdCDR2 with SEQ ID NO: 147, a sdCDR3 with SEQ ID NO:148. In some cases, the sdABD-HER2 has the amino acid sequence of SEQ ID NO:145, as provided in FIG. 5I.

[0268] In some embodiments, the sdABD-HER2 (e.g., sdABD-HER2 1058) has a sdCDR1 with SEQ ID NO:150, a sdCDR2 with SEQ ID NO:151, a sdCDR3 with SEQ ID NO:153. In some cases, the sdABD-HER2 has the amino acid sequence of SEQ ID NO:149, as provided in FIG. 5I.

[0269] In some embodiments, the sdABD-HER2 (e.g., sdABD-HER2 1059) has a sdCDR1 with SEQ ID NO:154, a sdCDR2 with SEQ ID NO: 155, a sdCDR3 with SEQ ID NO:156. In some cases, the sdABD-HER2 has the amino acid sequence of SEQ ID NO:153, as provided in FIG. 5I.

[0270] some embodiments, the sdABD-HER2 (e.g., sdABD-HER2 1065) has a sdCDR1 with SEQ ID NO:158, a sdCDR2 with SEQ ID NO:159, a sdCDR3 with SEQ ID NO:160. In some cases, the sdABD-HER2 has the amino acid sequence of SEQ ID NO:157, as provided in FIG. 5I.

[0271] In some embodiments, the sdABD-HER2 (e.g., sdABD-HER2 1090) has a sdCDR1 with SEQ ID NO:162, a sdCDR2 with SEQ ID NO:163, a sdCDR3 with SEQ ID NO:164. In some cases, the sdABD-HER2 has the amino acid sequence of SEQ ID NO:161, as provided in FIG. 5I.

[0272] In some embodiments, the sdABD-HER2 (e.g., sdABD-HER2 1191) has a sdCDR1 with SEQ ID NO:166, a sdCDR2 with SEQ ID NO: 167, a sdCDR3 with SEQ ID NO:168. In some cases, the sdABD-HER2 has the amino acid sequence of SEQ ID NO:165, as provided in FIG. 5J.

[0273] In some embodiments, the sdABD-HER2 (e.g., sdABD-HER2 1092) has a sdCDR1 with SEQ ID NO:170, a sdCDR2 with SEQ ID NO:171, a sdCDR3 with SEQ ID NO:172. In some cases, the sdABD-HER2 has the amino acid sequence of SEQ ID NO:169, as provided in FIG. 5J.

[0274] In some embodiments, the sdABD-HER2 (e.g., sdABD-HER2 1097) has a sdCDR1 with SEQ ID NO:174, a sdCDR2 with SEQ ID NO:175, a sdCDR3 with SEQ ID NO:176. In some cases, the sdABD-HER2 has the amino acid sequence of SEQ ID NO:173, as provided in FIG. 5J.

[0275] In some embodiments, the sdABD-HER2 (e.g., sdABD-HER2 1118) has a sdCDR1 with SEQ ID NO:178, a sdCDR2 with SEQ ID NO: 179, a sdCDR3 with SEQ ID NO:180. In some cases, the sdABD-HER2 has the amino acid sequence of SEQ ID NO:177, as provided in FIG. 5J.

[0276] In some embodiments, the sdABD-HER2 (e.g., sdABD-HER2 1121) has a sdCDR1 with SEQ ID NO:182, a sdCDR2 with SEQ ID NO:183, a sdCDR3 with SEQ ID NO:184. In some cases, the sdABD-HER2 has the amino acid sequence of SEQ ID NO:181, as provided in FIG. 5J.

[0277] In some embodiments, the sdABD-HER2 (e.g., sdABD-HER2 1134) has a sdCDR1 with SEQ ID NO:186, a sdCDR2 with SEQ ID NO:187, a sdCDR3 with SEQ ID NO:188. In some cases, the sdABD-HER2 has the amino acid sequence of SEQ ID NO:185, as provided in FIG. 5K.

[0278] In some embodiments, the sdABD-HER2 (e.g., sdABD-HER2 1138) has a sdCDR1 with SEQ ID NO:190, a sdCDR2 with SEQ ID NO:191, a sdCDR3 with SEQ ID NO:192. In some cases, the sdABD-HER2 has the amino acid sequence of SEQ ID NO:189, as provided in FIG. 5K.

[0279] In some embodiments, the sdABD-HER2 (e.g., sdABD-HER2 1139) has a sdCDR1 with SEQ ID NO:194, a sdCDR2 with SEQ ID NO: 195, a sdCDR3 with SEQ ID NO:196. In some cases, the sdABD-HER2 has the amino acid sequence of SEQ ID NO:193, as provided in FIG. 5K.

[0280] In some embodiments, the sdABD-HER2 (e.g., sdABD-HER2 1140) has a sdCDR1 with SEQ ID NO:198, a sdCDR2 with SEQ ID NO: 199, a sdCDR3 with SEQ ID NO:200. In some cases, the sdABD-HER2 has the amino acid sequence of SEQ ID NO:197, as provided in FIG. 5K.

[0281] In some embodiments, the sdABD-HER2 (e.g., sdABD-HER2 1145) has a sdCDR1 with SEQ ID NO:202, a sdCDR2 with SEQ ID NO:203, a sdCDR3 with SEQ ID NO:204. In some cases, the sdABD-HER2 has the amino acid sequence of SEQ ID NO:201, as provided in FIG. 5K.

[0282] some embodiments, the sdABD-HER2 (e.g., sdABD-HER2 1146) has a sdCDR1 with SEQ ID NO:206, a sdCDR2 with SEQ ID NO:207, a sdCDR3 with SEQ ID NO:203. In some cases, the sdABD-HER2 has the amino acid sequence of SEQ ID NO:205, as provided in FIG. 5L.

[0283] In some embodiments, the sdABD-HER2 (e.g., sdABD-HER2 1149) has a sdCDR1 with SEQ ID NO:210, a sdCDR2 with SEQ ID NO:211, a sdCDR3 with SEQ ID NO:212. In some cases, the sdABD-HER2 has the amino acid sequence of SEQ ID NO:209, as provided in FIG. 5L.

[0284] In some embodiments, the sdABD-HER2 (e.g., sdABD-HER2 1150) has a sdCDR1 with SEQ ID NO:214, a sdCDR2 with SEQ ID NO:215, a sdCDR3 with SEQ ID NO:216. In some cases, the sdABD-HER2 has the amino acid sequence of SEQ ID NO:213, as provided in FIG. 5L.

[0285] In some embodiments, the sdABD-HER2 (e.g., sdABD-HER2 1156) has a sdCDR1 with SEQ ID NO:218, a sdCDR2 with SEQ ID NO:219, a sdCDR3 with SEQ ID NO:220. In some cases, the sdABD-HER2 has the amino acid sequence of SEQ ID NO:217, as provided in FIG. 5L.

[0286] In some embodiments, the sdABD-HER2 (e.g., sdABD-HER2 1158) has a sdCDR1 with SEQ ID NO:222, a sdCDR2 with SEQ ID NO:223, a sdCDR3 with SEQ ID NO:224. In some cases, the sdABD-HER2 has the amino acid sequence of SEQ ID NO:221, as provided in FIG. 5L.

[0287] In some embodiments, the sdABD-HER2 (e.g., sdABD-HER2 1159) has a sdCDR1 with SEQ ID NO:226, a sdCDR2 with SEQ ID NO:227, a sdCDR3 with SEQ ID NO:228. In some cases, the sdABD-HER2 has the amino acid sequence of SEQ ID NO:225, as provided in FIG. 5M.

[0288] In some embodiments, the sdABD-HER2 (e.g., sdABD-HER2 1160) has a sdCDR1 with SEQ ID NO:230, a sdCDR2 with SEQ ID NO:231, a sdCDR3 with SEQ ID NO:232. In some cases, the sdABD-HER2 has the amino acid sequence of SEQ ID NO:229, as provided in FIG. 5M.

[0289] In some embodiments, the sdABD-HER2 (e.g., sdABD-HER2 1161) has a sdCDR1 with SEQ ID NO:234, a sdCDR2 with SEQ ID NO:235, a sdCDR3 with SEQ ID NO:236. In some cases, the sdABD-HER2 has the amino acid sequence of SEQ ID NO:233, as provided in FIG. 5M.

[0290] In some embodiments, the sdABD-HER2 (e.g., sdABD-HER2 1162) has a sdCDR1 with SEQ ID NO:238, a sdCDR2 with SEQ ID NO:239, a sdCDR3 with SEQ ID NO:240. In some cases, the sdABD-HER2 has the amino acid sequence of SEQ ID NO:237, as provided in FIG. 5M.

[0291] In some embodiments, the sdABD-HER2 (e.g., sdABD-HER2 1163) has a sdCDR1 with SEQ ID NO:242, a sdCDR2 with SEQ ID NO:243, a sdCDR3 with SEQ ID NO:244. In some cases, the sdABD-HER2 has the amino acid sequence of SEQ ID NO:241, as provided in FIG. 5M.

[0292] In some embodiments, the sdABD-HER2 (e.g., humanized aHER2 sdAb h1130) has a sdCDR1 with SEQ ID NO:500, a sdCDR2 with SEQ ID NO:501, a sdCDR3 with SEQ ID NO:502. In some cases, the sdABD-HER2 has the amino acid sequence of SEQ ID NO:499, as provided in FIG. 75.

[0293] In some embodiments, the sdABD-HER2 (e.g., humanized aHER2 sdAb h1156) has a sdCDR1 with SEQ ID NO:504, a sdCDR2 with SEQ ID NO:505, a sdCDR3 with SEQ ID NO:506. In some cases, the sdABD-HER2 has the amino acid sequence of SEQ ID NO:503, as provided in FIG. 75. Epitope mapping revealed that the humanized aHER2 sdAb h1156 binds to the amino acid sequence WK at amino acid positions 147-148, the amino acid sequence LALTL (SEQ ID NO:515) at amino acid positions 157-161, and the amino acid sequence TRTVC (SEQ ID NO:516) at amino acid positions 194-198 of the HER2 protein (FIG. 36).

[0294] In some embodiments, the sdABD-HER2 (e.g., humanized aHER2 sdAb h1159) has a sdCDR1 with SEQ ID NO:508, a sdCDR2 with SEQ ID NO:509, a sdCDR3 with SEQ ID NO:510. In some cases, the sdABD-HER2 has the amino acid sequence of SEQ ID NO:507, as provided in FIG. 75.

[0295] In some embodiments, the sdABD-HER2 (e.g., humanized aHER2 sdAb h1162) has a sdCDR1 with SEQ ID NO:512, a sdCDR2 with SEQ ID NO:513, a sdCDR3 with SEQ ID NO:514. In some cases, the sdABD-HER2 has the amino acid sequence of SEQ ID NO:511, as provided in FIG. 75. Epitope mapping revealed that the humanized aHER2 sdAb h1162 binds to the amino acid sequence QLTFRNPHQALL at amino acid positions 462-472 the HER2 protein (FIG. 36).

[0296] In some embodiments, the protein prior to cleavage of the protease cleavage domain is less than about 100 kDa. In some embodiments, the protein after cleavage of the protease cleavage domain is about 25 to about 75 kDa. In some embodiments, the protein prior to protease cleavage has a size that is above the renal threshold for first-pass clearance. In some embodiments, the protein prior to protease cleavage has an elimination half-time of at least about 50 hours. In some embodiments, the protein prior to protease cleavage has an elimination half-time of at least about 100 hours. In some embodiments, the protein has increased tissue penetration as compared to an IgG to the same target antigen. In some embodiments, the protein has increased tissue distribution as compared to an IgG to the same target antigen.

[0297] C. Half Life Extension Domains

[0298] The MCE proteins of the invention (again, also referred to herein as “COBRA™” proteins or constructs) optionally include half-life extension domains. Such domains are contemplated to include but are not limited to HSA binding domains, Fc domains, small molecules, and other half-life extension domains known in the art.

[0299] Human serum albumin (HSA) (molecular mass ˜67 kDa) is the most abundant protein in plasma, present at about 50 mg/ml (600 μM), and has a half-life of around 20 days in humans. HSA serves to maintain plasma pH, contributes to colloidal blood pressure, functions as carrier of many metabolites and fatty acids, and serves as a major drug transport protein in plasma.

[0300] Noncovalent association with albumin extends the elimination half-time of short lived proteins. For example, a recombinant fusion of an albumin binding domain to a Fab fragment resulted in a reduced in vivo clearance of 25- and 58-fold and a half-life extension of 26- and 37-fold when administered intravenously to mice and rabbits respectively as compared to the administration of the Fab fragment alone. In another example, when insulin is acylated with fatty acids to promote association with albumin, a protracted effect was observed when injected subcutaneously in rabbits or pigs. Together, these studies demonstrate a linkage between albumin binding and prolonged action.

[0301] In many embodiments, the half-life extension domain is a single domain antigen binding domain from a single domain antibody that binds to HSA. This domain is generally referred to herein as “sdABD” to human HSA (sdABD-HSA), or alternatively “sdABD(½)”, to distinguish these binding domains from the sdABDs to TTAs. A particularly useful sdABD(½) is shown in FIG. 6.

[0302] In some embodiments, the sdABD-HSA (e.g., sdABD-HSA (10GE)) has a sdCDR1 with SEQ ID NO:246, a sdCDR2 with SEQ ID NO:247, a sdCDR3 with SEQ ID NO:248. In some embodiments, the sdABD-HSA has the amino acid sequences of SEQ ID NO:245. In certain embodiments, the sdABD-HSA (e.g., sdABD-HSA with a histidine (His) tag) has a sdCDR1 with SEQ ID NO:250, a sdCDR2 with SEQ ID NO:251, a sdCDR3 with SEQ ID NO:252. In some embodiments, the sdABD-HSA has the amino acid sequences of SEQ ID NO:249.

[0303] The half-life extension domain of an antigen binding protein provides for altered pharmacodynamics and pharmacokinetics of the antigen binding protein itself. As above, the half-life extension domain extends the elimination half-time. The half-life extension domain also alters pharmacodynamic properties including alteration of tissue distribution, penetration, and diffusion of the antigen-binding protein. In some embodiments, the half-life extension domain provides for improved tissue (including tumor) targeting, tissue penetration, tissue distribution, diffusion within the tissue, and enhanced efficacy as compared with a protein without a half-life extension binding domain. In one embodiment, therapeutic methods effectively and efficiently utilize a reduced amount of the antigen-binding protein, resulting in reduced side effects, such as reduced non-tumor cell cytotoxicity.

[0304] Further, characteristics of the half-life extension domain, for example a HSA binding domain, include the binding affinity of the HSA binding domain for HSA. Affinity of the HSA binding domain can be selected so as to target a specific elimination half-time in a particular polypeptide construct. Thus, in some embodiments, the HSA binding domain has a high binding affinity. In other embodiments, the HSA binding domain has a medium binding affinity. In yet other embodiments, the HSA binding domain has a low or marginal binding affinity. Exemplary binding affinities include KD concentrations at 10 nM or less (high), between 10 nM and 100 nM (medium), and greater than 100 nM (low). As above, binding affinities to HSA are determined by known methods such as Surface Plasmon Resonance (SPR).

[0305] D. Protease Cleavage Sites

[0306] The protein compositions of the invention, and particularly the prodrug constructs, include one or more protease cleavage sites, generally resident in cleavable linkers, as outlined herein.

[0307] As described herein, the prodrug constructs of the invention include at least one protease cleavage site comprising an amino acid sequence that is cleaved by at least one protease. In some cases, the MCE proteins described herein comprise 1, 2, 3, 4, 5, 6, 7, 8, 9, 10, 11, 12, 13, 14, 15, 16, 17, 18, 19, 20, or more protease cleavage sites that are cleaved by at least one protease. As is more fully discussed herein, when more than one protease cleavage site is used in a prodrug construction, they can be the same (e.g. multiple sites that are cleaved by a single protease) or different (two or more cleavage sites are cleaved by at least two different proteases). As will be appreciated by those in the art, constructs containing three or more protease cleavage sites can utilize one, two, three, etc.; e.g. some constructs can utilize three sites for two different proteases, etc.

[0308] The amino acid sequence of the protease cleavage site will depend on the protease that is targeted. As is known in the art, there are a number of human proteases that are found in the body and can be associated with disease states.

[0309] Proteases are known to be secreted by some diseased cells and tissues, for example tumor or cancer cells, creating a microenvironment that is rich in proteases or a protease-rich microenvironment. In some cases, the blood of a subject is rich in proteases. In some cases, cells surrounding the tumor secrete proteases into the tumor microenvironment. Cells surrounding the tumor secreting proteases include but are not limited to the tumor stromal cells, myofibroblasts, blood cells, mast cells, B cells, NK cells, regulatory T cells, macrophages, cytotoxic T lymphocytes, dendritic cells, mesenchymal stem cells, polymorphonuclear cells, and other cells. In some cases, proteases are present in the blood of a subject, for example proteases that target amino acid sequences found in microbial peptides. This feature allows for targeted therapeutics such as antigen-binding proteins to have additional specificity because T cells will not be bound by the antigen binding protein except in the protease rich microenvironment of the targeted cells or tissue.

[0310] Proteases are proteins that cleave proteins, in some cases, in a sequence-specific manner. Proteases include but are not limited to serine proteases, cysteine proteases, aspartate proteases, threonine proteases, glutamic acid proteases, metalloproteases, asparagine peptide lyases, serum proteases, cathepsins (e.g. cathepsin B, cathepsin C, cathepsin D, cathepsin E, cathepsin K, cathepsin L, cathepsinS, etc.), kallikreins, hK1, hK10, hK15, KLK7, granzymeB, plasmin, collagenase, Type IV collagenase, stromelysin, factor XA, chymotrypsin-like protease, trypsin-like protease, elastase-like protease, subtilisin-like protease, actinidain, bromelain, calpain, caspases (e.g. caspase-3), Mir1-CP, papain, HIV-1 protease, HSV protease, CMV protease, chymosin, renin, pepsin, matriptase, legumain, plasmepsin, nepenthesin, metalloexopeptidases, metalloendopeptidases, matrix metalloproteases (MMP), MMP1, MMP2, MMP3, MMP8, MMP9, MMP13, MMP11, MMP14, meprin, urokinase plasminogen activator (uPA), enterokinase, prostate-specific antigen (PSA, hK3), interleukin-1β converting enzyme, thrombin, FAP (FAP-α), dipeptidyl peptidase, and dipeptidyl peptidase IV (DPPIV/CD26).

[0311] Some suitable proteases and protease cleavage sequences are shown in FIGS. 8A-8D. In some embodiments, any one of fusion proteins described herein comprise a cleavable linker comprising a protease cleavage domain sequence set forth in any one of SEQ ID NOS:339-408 and 532-535.

[0312] E. Linkers

[0313] As is discussed herein, the different domains of the invention are generally linked together using amino acid linkers, which can confer functionality as well, including flexibility or inflexibility (e.g. steric constraint) as well as the ability to be cleaved using an in situ protease. These linkers can be classified in a number of ways.

[0314] The invention provides “domain linkers”, which are used to join two or more domains (e.g. a VH and a VL, a target tumor antigen binding domain (TTABD, sometimes also referred to herein as “αTTA” (for “anti-TTA”) to a VH or VL, a half life extension domain to another component, etc.). Domain linkers can be non-cleavable (“NCL”), cleavable (“CL”), constrained and cleavable (“CCL”) and constrained and non-cleavable “(CNCL”), for example.

[0315] 1. Non-Cleavable Linkers

[0316] In some embodiments, the domain linker is non-cleavable. Generally, these can be one of two types: non-cleavable and flexible, allowing for the components “upstream” and “downstream” of the linker in the constructs to intramolecularly self-assemble in certain ways; or non-cleavable and constrained, where the two components separated by the linker are not able to intramolecularly self-assemble. It should be noted, however, that in the latter case, while the two component domains that are separated by the non-cleavable constrained linker do not intramolecularly self-assemble, other intramolecular components will self-assemble to form the pseudo Fv domains.

[0317] (a) Non-Cleavable but Flexible Linkers

[0318] In this embodiment, the linker is used to join domains to preserve the functionality of the domains, generally through longer, flexible domains that are not cleaved by in situ proteases in a patient. Examples of internal, non-cleavable linkers suitable for linking the domains in the polypeptides of the invention include but are not limited to (GS)n, (GGS)n, (GGGS)n [SEQ ID NO:518], (GGSG)n [SEQ ID NO:519], (GGSGG)n [SEQ ID NO:520], or (GGGGS)n [SEQ ID NO:521], wherein n is 1, 2, 3, 4, 5, 6, 7, 8, 9, or 10. In some embodiments the length of the linker can be about 15 amino acids.

[0319] (b) Non-Cleavable and Constrained Linkers

[0320] In some cases, the linkers do not contain a cleavage site and are also too short to allow the protein domains separated by the linker to intramolecularly self-assemble, and are “constrained non-cleavable linkers” or “CNCLs”. For example, in Pro186, an active VH and an active VL are separated by 8 amino acids (an “8-mer” or “8mer”) that does not allow the VH and VL to self-assemble into an active antigen binding domain. In some embodiments, the linker is still flexible; for example, (GGGS)n where n=2. In other embodiments, although generally less preferred, more rigid linkers can be used, such as those that include proline or bulky amino acids.

[0321] 2. Cleavable Linkers

[0322] All of the prodrug constructs herein include at least one cleavable linker. Thus, in one embodiment, the domain linker is cleavable (CL), sometimes referred to herein as a “protease cleavage domain” (“PCD”). In this embodiment, the CL contains a protease cleavage site, as outlined herein and as depicted in FIGS. 8A-8D. In some cases, the CL contains just the protease cleavage site. Optionally, depending on the length of the cleavage recognition site, there can be an extra few linking amino acids at either or both of the N- or C-terminal end of the CL; for example, there may be from 1, 2, 3, 4 or 5, or more amino acids on either or both of the N- and C-termini of the cleavage site. Thus, cleavable linkers can also be constrained (e.g. 8mers) or flexible.

[0323] Of particular interest in the present invention are MMP9 cleavable linkers and meprin cleavable linkers, particularly MMP9 constrained cleavable linkers and meprin constrained cleavable linkers.

### II. Domains of the Invention

[0324] The present invention provides a number of different formats for the prodrug polypeptides of the invention. The present invention provides constrained Fv domains and constrained pseudo Fv domains. Additionally, the present invention provides multivalent conditionally effective (“MCE”) proteins which contain two Fv domains but are non-isomerizing constructs. As outlined herein, these can be non-isomerizing cleavable formats or non-isomerizing non-cleavable formats, although every construct contains at least one protease cleavage domain.

[0325] Importantly, while both of these domains (Fv domains and pseudo Fv domains) are referred to herein as “constrained”, meaning that as discussed above and shown in FIGS. 1-5, only one of these needs to be constrained, although generally, when both linkers are constrained, the protein has better expression.

[0326] Those of skill in the art will appreciate that for Formats 1, 2 and 4, there are four possibilities for the N- to C-terminal order of the constrained and pseudo Fv domains of the invention (not showing the linkers): aVH-aVL and iVL-iVH, aVH-aVL and iVH-iVL, aVL-aVH and iVL-iVH, aVL-aVH and iVH-iVL. All four have been tested and all four have activity, although the first order, aVH-aVL and iVL-iVH, shows better expression than the other three. Thus while the description herein is generally shown in this aVH-aVL and iVL-iVH format, all disclosure herein includes the other orders for these domains as well.

[0327] Note that generally, the N to C-terminal order for the full length constructs of the invention is based on the aVH-aVL and iVL-iVH orientation.

[0328] Additionally, it is known in the art that there can be immunogenicity in humans originating from the C-terminal sequences of certain ABDs. Accordingly, in general, particularly when the C-terminus of the constructs terminates in a sdABD (for example, the sdABD-HSA domains of many of the constructs, a histidine tag (either His6 or His10) can be used. Many or most of the sequences herein were generated using His6 C-terminal tags for purification reasons, but these sequences can also be used to reduce immunogenicity in humans, as is shown by Holland et al., DOI 10.1007/s10875-013-9915-0 and WO2013/024059.

[0329] A. Constrained Fv Domains

[0330] The present invention provides constrained Fv domains, that comprise an active VH and an active VL domain that are covalently attached using a constrained linker (which, as outlined herein, can be cleavable (Format 1) or non-cleavable (Formats 2 and 4)). The constrained linker prevents intramolecular association between the aVH and aVL in the absence of cleavage. Thus, a constrained Fv domain general comprises a set of six CDRs contained within variable domains, wherein the vhCDR1, vhCDR2 and vhCDR3 of the VH bind human CD3 and the vlCDR1, vCDR2 and vlCDR3 of the VL bind human CD3, but in the prodrug format (e.g. uncleaved), the VH and VL are unable to sterically associate to form an active binding domain, preferring instead to pair intramolecularly with the pseudo Fv.

[0331] The constrained Fv domains can comprise active VH and active VL (aVH and aVL) or inactive VH and VL (iVH and iVL, in which case it is a constrained pseudo Fv domain) or combinations thereof as described herein.

[0332] As will be appreciated by those in the art, the order of the VH and VL in a constrained Fv domain can be either (N- to C-terminal) VH-linker-VL or VL-linker-VH.

[0333] As outlined herein, for Format 1 constructs, the constrained Fv domains can comprise a VH and a VL linked using a cleavable linker, in cases such as those shown in FIG. 1. In this embodiment, the constrained Fv domain has the structure (N- to C-terminus) vhFR1-vhCDR1-vhFR2-vhCDR2-vhFR3-vhCDR3-vhFR4-CCL-vlFR1-vlCDR1-vlFR2-vlCDR2-vlFR3-vlCDR3-vlFR4 In general, the constrained Fv domain contains active VH and VL domains (e.g., able to bind CD3 when associated) and thus has the structure (N- to C-terminus) vhFR1-avhCDR1-vhFR2-avhCDR2-vhFR3-avhCDR3-vhFR4-CCL-vlFR1-avlCDR1-vlFR2-avlCDR2-vlFR3-avlCDR3-vlFR4.

[0334] As outlined herein, for Format 2 constructs, the constrained Fv domains can comprise a VH and a VL linked using a non-cleavable linker. In this embodiment, the constrained Fv domain has the structure (N- to C-terminus) vhFR1-vhCDR1-vhFR2-vhCDR2-vhFR3-vhCDR3-vhFR4-CNCL-vlFR1-vlCDR1-vlFR2-vlCDR2-vlFR3-vlCDR3-vlFR4. In general, the constrained Fv domain contains active VH and VL domains (e.g. able to bind CD3 when associated) and thus has the structure (N- to C-terminus) vhFR1-avhCDR1-vhFR2-avhCDR2-vhFR3-avhCDR3-vhFR4-CNCL-vlFR1-avlCDR1-vlFR2-avlCDR2-vlFR3-avlCDR3-vlFR4.

[0335] Of particular use in the present invention are constrained non-cleavable Fv domains having an aVH having SEQ ID NO:270, an aVL having SEQ ID NO:254, and a domain linker having SEQ ID NO:287.

[0336] B. Constrained Pseudo Fv Domains

[0337] The present invention provides constrained pseudo Fv domains, comprising inactive or pseudo iVH and iVL domains that are covalently attached using a constrained linker (which, as outlined herein, can be cleavable or non-cleavable). The constrained linker prevents intramolecular association between the iVH and iVL in the absence of cleavage. Thus, a constrained pseudo Fv domain general comprises an iVH and an iVL with framework regions that allow association (when in a non-constrained format) of the iVH and iVL, although the resulting pseudo Fv domain does not bind to a human protein. iVH domains can assemble with aVL domains, and iVL domains can assemble with aVH domains, although the resulting structures do not bind to CD3.

[0338] The constrained pseudo Fv domains comprise inactive VH and VL (iVH and iVL).

[0339] As will be appreciated by those in the art, the order of the VH and VL in a constrained pseudo Fv domain can be either (N- to C-terminal) VH-linker-VL or VL-linker-VH.

[0340] As outlined herein, the constrained pseudo Fv domains can comprise a iVH and an iVL linked using a non-cleavable linker, as shown in Formats 1, 2 and 4, or with cleavable linkers, as shown in Format 3.

[0341] In general, the constrained Fv domain contains inert VH and VL domains (e.g. able to bind CD3 when associated) and thus has the structure (N- to C-terminus) vhFR1-ivlCDR1-vhFR2-ivlCDR2-vhFR3-ivlCDR3-vhFR4-CNCL-vlFR1-ivhCDR1-vlFR2-ivhCDR2-vlFR3-ivhCDR3-vlFR4.

[0342] Of particular use in the present invention are constrained non-cleavable pseudo Fv domains having (i) an iVH having SEQ ID NO:274 (αCD3 VHi), SEQ ID NO:278 (αCD3 VHi2) or SEQ ID NO:282 (αCD3 VHiGL4), (ii) an iVL having SEQ ID NO:258 (αCD3 VLi), SEQ ID NO:262 (αCD3 VLi2) or SEQ ID NO:266 (αCD3 VLiGL), and (iii) a domain linker having SEQ ID NO:287. In some embodiments, a constrained non-cleavable pseudo Fv domain comprises (i) an iVH having an amino acid sequence of SEQ ID NO:274 (αCD3 VHi), (ii) an iVL having an amino acid sequence of SEQ ID NO:258 (αCD3 VLi), and (iii) a domain linker having an amino acid sequence of SEQ ID NO:287. In some embodiments, a constrained non-cleavable pseudo Fv domain comprises (i) an iVH having an amino acid sequence of SEQ ID NO:278 (αCD3 VHi2), (ii) an iVL having an amino acid sequence of SEQ ID NO:262 (αCD3 VLi2), and (iii) a domain linker having an amino acid sequence of SEQ ID NO:287. In some embodiments, a constrained non-cleavable pseudo Fv domain comprises (i) an iVH having an amino acid sequence of SEQ ID NO:282 (αCD3 VHi2GL4), (ii) an iVL having an amino acid sequence of SEQ ID NO:266 (αCD3 VLi2GL), and (iii) a domain linker having an amino acid sequence of SEQ ID NO:287

### III. Formats of the Invention

[0343] As discussed herein, the pro-drug constructs of the invention can take on a number of different formats, including cleavable formats with dual TTA binding domains, non-cleavable formats with dual TTA binding domains (either of which can have the same TTA binding domains or different binding domains), and non-cleavable formats with a single targeting domain.

[0344] A. “Format 2” Constructs

[0345] As shown in FIG. 2, the invention provides non-isomerizing non-cleavable formats. In this embodiment, it is understood that the “non-cleavable” applies only to the linkage of the constrained Fv domain, as there is the activating cleavage site in the prodrug construct. In this embodiment, the constrained Fv domain comprise VH and VL domains that are linked using constrained non-cleavable linkers and the constrained pseudo Fv domain uses constrained non-cleavable linkers.

[0346] As will be appreciated by those in the art, the order of the VH and VL in either a constrained Fv domain or a constrained pseudo Fv domain can be either (N- to C-terminal) VH-linker-VL or VL-linker-VH.

[0347] The invention provides prodrug proteins, comprising, from N- to C-terminal: (sdABD-TTA1)-domain linker-constrained Fv domain-domain linker-(sdABD-TTA2)-cleavable linker-constrained pseudo Fv domain-domain linker-(sdABD-HSA).

[0348] As will be appreciated by those in the art, the order of the VH and VL in either a constrained Fv domain or a constrained pseudo Fv domain can be either (N- to C-terminal) VH-linker-VL or VL-linker-VH.

[0349] Thus, in one embodiment, the prodrug protein comprises, from N- to C-terminal: (sdABD-TTA1)-domain linker-aVH-CNCL-aVL-domain linker-(sdABD-TTA2)-CL-iVL-CNCL-iVH-domain linker-(sdABD-HSA).

[0350] Thus, in one embodiment, the prodrug protein comprises, from N- to C-terminal: (sdABD-TTA1)-domain linker-aVH-CNCL-aVL-domain linker-(sdABD-TTA2)-CL-iVH-CNCL-iVL-domain linker-(sdABD-HSA).

[0351] Thus, in one embodiment, the prodrug protein comprises, from N- to C-terminal: (sdABD-TTA1)-domain linker-aVL-CNCL-aVH-domain linker-(sdABD-TTA2)-CL-iVL-CNCL-iVH-domain linker-(sdABD-HSA).

[0352] Thus, in one embodiment, the prodrug protein comprises, from N- to C-terminal: (sdABD-TTA1)-domain linker-aVL-CNCL-aVH-domain linker-(sdABD-TTA2)-CL-iVH-CNCL-iVL-domain linker-(sdABD-HSA).

[0353] In some embodiments, the prodrug protein described herein is provided in the figures including FIGS. 9C-9V and the corresponding sequences set forth as SEQ ID NOS:413-452, which represent the exemplary proteins Pro225, Pro226, Pro233, Pro311, Pro312, Pro313, Pro246, Pro256, Pro420, Pro421, Pro393, Pro394, Pro395, Pro396, Pro429, Pro430, Pro431, Pro258, Pro221, Pro222, Pro223, Pro224, Pro254, Pro255, Pro262, Pro356, Pro359, Pro364, Pro388, Pro429, Pro430, Pro431, Pro432, Pro448, Pro449, Pro450, Pro451, Pro479, Pro480, and Pro495. In some embodiments, the prodrug protein described herein is provided in the figures including (i) FIGS. 10A-10EE and the corresponding sequences set forth as SEQ ID NOS: 288-290, 291-302, 304-334, 336, 338 and 522-530, which represent the exemplary proteins Pro601, Pro602, V3, V4, Pro664, Pro665, Pro667, Pro694, Pro695, Pro565, Pro566, Pro567, Pro727, Pro728, Pro729, Pro730, Pro731, Pro676, Pro677, Pro678, Pro679, Pro808, Pro819, Pro621, Pro622, Pro640, Pro641, Pro642, Pro643, Pro744, Pro746, Pro108, Pro109, Pro396, Pro476, Pro706, Pro709, Pro470, Pro471, Pro551, Pro552, Pro623, Pro624, Pro698, Pro655, Pro656, Pro657, Pro658, Pro516, Pro517, Pro518, Pro519, Pro513, Pro186, Pro225, and Pro817, (ii) FIGS. 12A-12Q and the corresponding sequences set forth as SEQ ID NOS:453-486 which represent the exemplary proteins aLyPD3 h787 COBRA, aLyPD3 h790 COBRA, aLyPD3 h804 COBRA, aLyPD3 h773 COBRA, aLyPD3 h840 COBRA, aLyPD3 h885 COBRA, aHER2 1054 COBRA, aHER2 1055 COBRA, aHER2 1058 COBRA, aHER2 1059 COBRA, aHER2 1065 COBRA, aHER2 1090 COBRA, aHER2 1091 COBRA, aHER2 1092 COBRA, aHER2 1097 COBRA, aHER2 1118 COBRA, aHER2 1121 COBRA, aHER2 1134 COBRA, aHER2 1138 COBRA, aHER2 1139 COBRA, aHER2 1140 COBRA, aHER2 1145 COBRA, aHER2 1146, aHER2 1149 COBRA, aHER2 1150 COBRA, aHER2 1156 COBRA, aHER2 1158 COBRA, aHER2 1159 COBRA, aHER2 1160 COBRA, aHER2 1161 COBRA, aHER2 1162 COBRA, aHER2 1163 COBRA, Pro824, and Pro826, (iii) FIGS. 71-74 and and the corresponding sequences set forth as SEQ ID NOS:487-494 which represent the exemplary proteins Pro751, Pro752, Pro824, Pro826, Pro1109, Pro1111, Pro1117 and Pro1118.

[0354] 1. Single Targeting Format 2 Constructs: “Mono-Specific COBRAs”

[0355] In some embodiments, both of the αTTA domains bind to the same tumor target antigen (TTA). Accordingly, in some embodiments, the prodrug protein comprises, from N- to C-terminal: (sdABD-TTA1)-domain linker-aVH-CNCL-aVL-domain linker-sdABD-TTA2)-CL-iVL-CNCL-iVH-domain linker-(sdABD-HSA). In this embodiment, the aVH, aVL, iVH, iVL have the sequences shown in FIGS. 7A-7B. In this embodiment, the two targeting domains bind to the same TTA, which can be EGFR, EpCAM, FOLR1, Trop2, CA9, B7H3, LyPD3 or HER2, the sequences for which are depicted in FIGS. 5A-5M.

[0356] In some embodiments, the sdABD-TTA1 is selected from the group consisting of a sdABD-B7H3, sdABD-CA9, sdABD-EGFR, sdABD-EpCAM, sdABD-FOLR1, sdABD-HER2, sdABD-LyPD3, and sdABD-Trop2. In some embodiments, the sdABD-TTA2 is selected from the group consisting of a sdABD-B7H3, sdABD-CA9, sdABD-EGFR, sdABD-EpCAM, sdABD-FOLR1, sdABD-HER2, sdABD-LyPD3, and sdABD-Trop2. In some embodiments, the sdABD-TTA1 and sdABD-TTA2 bind the same target antigen. In some embodiments, the sdABD-TTA1 and the sdABD-TTA2 bind the same target antigen but at different locations. In some embodiments, the sdABD-TTA1 and the sdABD-TTA2 bind the same target antigen but at the same location. In some embodiments, the sdABD-TTA1 and the sdABD-TTA2 have the same amino acid sequence. Any sequence of the sdABDs described herein can be the sequence of the sdABD-TTA1, the sdABD-TTA2, or both. In some embodiments, the sdCDR1, sdCDR2 and sdCDR3 of sdABD-TTA1 are the same as the the sdCDR1, sdCDR2 and sdCDR3 of sdABD-TTA2, respectively.

[0357] In some embodiments, exemplary mono-specific COBRAs (also referred to as single tumor antigen targeting COBRAs) bind to a tumor target antigen selected from the group consisting of B7H3, CA9, EGFR, EpCAM, FOLR1, HER2, LyPD3 and Trop2. In some embodiments, the monospecific COBRA contains any one of the sequence of an sdABD provided herein including the figures and formal sequence listing. In some embodiments, a mono-specific COBRA that bind to B7H3 (e.g., human B7H3) includes any of the fusion proteins of FIG. 9C, such as Pro225 (SEQ ID NO:413) and Pro226 (SEQ ID NO:414); FIGS. 10A-10E, such as Pro601 (SEQ ID NO:522), Pro602 (SEQ ID NO:523), V3 (SEQ ID NO:524), V4 (SEQ ID NO:525), Pro664 (SEQ ID NO:526), Pro665 (SEQ ID NO:527), Pro667 (SEQ ID NO:528), Pro694 (SEQ ID NO:529), and Pro695 (SEQ ID NO:530); FIGS. 100-10Q, such as Pro640 (SEQ ID NO:306), Pro641 (SEQ ID NO:307), Pro642 (SEQ ID NO:308), Pro643 (SEQ ID NO:309), Pro774 (SEQ ID NO:310) and Pro746 (SEQ ID NO:311); and FIGS. 10DD-10EE such as Pro225 (SEQ ID NO:336) and Pro817 (SEQ ID NO:338).

[0358] In some embodiments, a mono-specific COBRA that bind to CA9 (e.g., human CA9) includes any of the fusion proteins of FIGS. 10Z-10BB such as Pro516 (SEQ ID NO:329), Pro517 (SEQ ID NO:330), Pro518 (SEQ ID NO:331), and Pro519 (SEQ ID NO:332).

[0359] In some embodiments, a mono-specific COBRA that bind to EGFR (e.g., human EGFR) includes any of the fusion proteins of FIGS. 10S-10T such as Pro396 (SEQ ID NO:314), Pro476 (SEQ ID NO:315), Pro706 (SEQ ID NO:316), and Pro709 (SEQ ID NO:317).

[0360] In some embodiments, a mono-specific COBRA that bind to EpCAM (e.g., human EpCAM) includes any of the fusion proteins of FIGS. 10F-10J such as Pro565 (SEQ ID NO:288), Pro566 (SEQ ID NO:289), Pro567 (SEQ ID NO:290), Pro727 (SEQ ID NO:292), Pro728 (SEQ ID NO:293), Pro729 (SEQ ID NO:294), Pro730 (SEQ ID NO:295), and Pro731 (SEQ ID NO:296).

[0361] In some embodiments, a mono-specific COBRA that bind to FOLR1 (e.g., human FOLR1) includes any of the fusion proteins of FIGS. 9D and 9E such as Pro311 (SEQ ID NO:416), Pro312 (SEQ ID NO:417), and Pro313 (SEQ ID NO:418).

[0362] In some embodiments, a mono-specific COBRA that bind to HER2 (e.g., human HER2) includes any of the fusion proteins of FIGS. 12D-12P such as any one of SEQ ID NOS: 459-484; and FIGS. 73 and 74 such as Pro1109 (SEQ ID NO:491), Pro1111 (SEQ ID NO:492), Pro1117 (SEQ ID NO:493), and Pro1118 (SEQ ID NO:494).

[0363] In some embodiments, a mono-specific COBRA that bind to LyPD3 (e.g., human LyPD3) includes any of the fusion proteins of FIGS. 12A-12C such as any of SEQ ID NOS: 453-458.

[0364] In some embodiments, a mono-specific COBRA that bind to Trop2 (e.g., human Trop2) includes any of the fusion proteins of FIGS. 10J-10M such as Pro676 (SEQ ID NO:297), Pro677 (SEQ ID NO:298), Pro678 (SEQ ID NO:299), Pro679 (SEQ ID NO:300), Pro808 (SEQ ID NO:301), and Pro819 (SEQ ID NO:302).

[0365] 2. Dual Targeting Format 2 Constructs: “HeteroCOBRAs”

[0366] In some embodiments, each of the αTTA domains bind to a different tumor target. Accordingly, in some embodiments, the prodrug protein comprises, from N- to C-terminal: (sdABD-TTA1)-domain linker-aVH-CNCL-aVL-domain linker-(sdABD-TTA2)-CL-iVL-CNCL-iVH-domain linker-(sdABD-HSA). In this embodiment, the aVH, aVL, iVH, iVL have the sequences shown in FIGS. 5A-5B. In this embodiment, the two targeting domains bind to different TTAs.

[0367] In Format 2, preferred dual tumor antigen targeting constructs (sometimes referred to herein as “hetero-specific COBRAs” or “hetero-COBRAs”) include combinations that target EGFR and EpCAM, EGFR and Trop2, EGFR and FOLR1, EGFR and B7H3, EGFR and LyPD3, EGFR and HER2, EpCAM and FOLR1, EpCAM and B7H3, EpCAM and Trop2, EpCAM and LyPD3, EpCAM and HER2, FOLR1 and B7H3, FOLR1 and HER2, FOLR1 and Trop2, FOLR1 and LyPD3, B7H3 and HER2, B7H3 and Trop2, B7H3 and LyPD3, HER2 and Trop2, HER2 and LyPD3, and Trop2 and LyPD3. These sometimes are discussed herein as “EGFR×EpCAM”, etc., constructs.

[0368] In some embodiments, the sdABD-TTA1 is selected from the group consisting of a sdABD-B7H3, sdABD-CA9, sdABD-EGFR, sdABD-EpCAM, sdABD-FOLR1, sdABD-HER2, sdABD-LyPD3, and sdABD-Trop2. In some embodiments, the sdABD-TTA2 is selected from the group consisting of a sdABD-B7H3, sdABD-CA9, sdABD-EGFR, sdABD-EpCAM, sdABD-FOLR1, sdABD-HER2, sdABD-LyPD3, and sdABD-Trop2. In some embodiments, the sdABD-TTA1 and sdABD-TTA2 bind different target antigens.

[0369] In some embodiments, the sdABD-TTA1 is a sdABD-B7H3 and the sdABD-TTA2 is selected from the group consisting of a sdABD-CA9, sdABD-EGFR, sdABD-EpCAM, sdABD-FOLR1, sdABD-HER2, sdABD-LyPD3, and sdABD-Trop2. In some embodiments, the sdABD-TTA1 is a sdABD-CA9 and the sdABD-TTA2 is selected from the group consisting of a sdABD-B7H3, sdABD-EGFR, sdABD-EpCAM, sdABD-FOLR1, sdABD-HER2, sdABD-LyPD3, and sdABD-Trop2. In some embodiments, the sdABD-TTA1 is a sdABD-EGFR and the sdABD-TTA2 is selected from the group consisting of a sdABD-B7H3, sdABD-CA9, sdABD-EpCAM, s sdABD-FOLR1, dABD-HER2, sdABD-LyPD3, and sdABD-Trop2. In some embodiments, the sdABD-TTA1 is a sdABD-EpCAM and the sdABD-TTA2 is selected from the group consisting of a sdABD-B7H3, sdABD-CA9, sdABD-EGFR, sdABD-FOLR1, sdABD-HER2, sdABD-LyPD3, and sdABD-Trop2. In some embodiments, the sdABD-TTA1 is a sdABD-FOLR1 and the sdABD-TTA2 is selected from the group consisting of a sdABD-B7H3, sdABD-CA9, sdABD-EGFR, sdABD-pCAM, sdABD-HER2, sdABD-LyPD3, and sdABD-Trop2. In some embodiments, the sdABD-TTA1 is a sdABD-HER2 and the sdABD-TTA2 is selected from the group consisting of a sdABD-B7H3, sdABD-CA9, sdABD-EGFR, sdABD-EpCAM, sdABD-FOLR1, sdABD-LyPD3, and sdABD-Trop2. In some embodiments, the sdABD-TTA1 is a sdABD-LyPD3 and the sdABD-TTA2 is selected from the group consisting of a sdABD-B7H3, sdABD-CA9, sdABD-EGFR, sdABD-EpCAM, sdABD-FOLR1, sdABD-HER2, and sdABD-Trop2. In some embodiments, the sdABD-TTA1 is a sdABD-Trop2 and the sdABD-TTA2 is selected from the group consisting of a sdABD-B7H3, sdABD-CA9, sdABD-EGFR, sdABD-EpCAM, sdABD-FOLR1, sdABD-HER2, and sdABD-LyPD3. Any sequence of a sdABD-TTA described herein such as those of a sdABD-B7H3, a sdABD-CA9, a sdABD-EGFR, a sdABD-EpCAM, a sdABD-FOLR1, a sdABD-HER2, a sdABD-LyPD3 and a sdABD-Trop2 can be used in a dual targeting format 2 construct or hetero-COBRA.

[0370] In many embodiments, the sdABD-TTA1 is selected from the group consisting of a sdABD-CA9, sdABD-EGFR, sdABD-EpCAM, sdABD-FOLR1, sdABD-HER2, sdABD-LyPD3, and sdABD-Trop2, and the sdABD-TTA2 is a sdABD-B7H3. In many embodiments, the sdABD-TTA1 is selected from the group consisting of a sdABD-B7H3, sdABD-EGFR, sdABD-EpCAM, sdABD-FOLR1, sdABD-HER2, sdABD-LyPD3, and sdABD-Trop2, and the sdABD-TTA2 is a sdABD-CA9. In many embodiments, the sdABD-TTA1 is selected from the group consisting of a sdABD-B7H3, sdABD-CA9, sdABD-EpCAM, sdABD-FOLR1, sdABD-HER2, sdABD-LyPD3, and sdABD-Trop2, and the sdABD-TTA2 is a sdABD-EGFR. In many embodiments, the sdABD-TTA1 is selected from the group consisting of a sdABD-B7H3, sdABD-CA9, sdABD-EGFR, sdABD-FOLR1, sdABD-HER2, sdABD-LyPD3, and sdABD-Trop2, and the sdABD-TTA2 is a sdABD-EpCAM. In many embodiments, the sdABD-TTA1 is selected from the group consisting of a sdABD-B7H3, sdABD-CA9, sdABD-EGFR, sdABD-EpCAM, sdABD-HER2, sdABD-LyPD3, and sdABD-Trop2, and the sdABD-TTA2 is a sdABD-FOLR1. In many embodiments, the sdABD-TTA1 is selected from the group consisting of a sdABD-B7H3, sdABD-CA9, sdABD-EGFR, sdABD-EpCAM, sdABD-FOLR1, sdABD-LyPD3, and sdABD-Trop2, and the sdABD-TTA2 is a sdABD-HER2. In many embodiments, the sdABD-TTA1 is selected from the group consisting of a sdABD-B7H3, sdABD-CA9, sdABD-EGFR, sdABD-EpCAM, sdABD-FOLR1, dABD-HER2, and sdABD-Trop2, and the sdABD-TTA2 is a sdABD-LyPD3. In many embodiments, the sdABD-TTA1 is selected from the group consisting of a sdABD-B7H3, sdABD-CA9, sdABD-EGFR, sdABD-EpCAM, sdABD-FOLR1, sdABD-HER2, and sdABD-LyPD3, and the sdABD-TTA2 is a sdABD-Trop2. Any sequence of a sdABD-TTA described herein such as those of a sdABD-B7H3, a sdABD-CA9, a sdABD-EGFR, a sdABD-EpCAM, a sdABD-HER2, a sdABD-LyPD3 and a sdABD-Trop2 can be used in such dual targeting format 2 constructs or hetero-COBRAs.

[0371] a. EGFR×EpCAM

[0372] In some embodiments, the prodrug protein comprises, from N- to C-terminal: (sdABD-TTA1)-domain linker-aVH-CNCL-aVL-domain linker-(sdABD-TTA2)-CL-iVL-CNCL-iVH-domain linker-(sdABD-HSA). In this embodiment, the aVH, aVL, iVH, iVL have the sequences shown in FIGS. 7A-7B. In this embodiment, the two targeting domains bind to EGFR and EpCAM, and the sdABD-TTAs have the sequences in FIGS. 5A, 5D, 5E, and 75 and the sequences provided therein and the corresponding sequence listing. In this embodiment, some combinations of the EGFR sdABD and the EpCAM sdABD include:

| cross | EGFR1 | hEGFR1 | EGFR2 | EGFR2a | EGFR2d |
|---|---|---|---|---|---|
| EpCAM h13 | In either | In either | In either | In either | In either |
| | orientation | orientation | orientation | orientation | orientation |
| EpCAM h23 | In either | In either | In either | In either | In either |
| | orientation | orientation | orientation | orientation | orientation |
| EpCAM | In either | In either | In either | In either | In either |
| hVIB665 | orientation | orientation | orientation | orientation | orientation |
| EpCAM | In either | In either | In either | In either | In either |
| hVIB666 | orientation | orientation | orientation | orientation | orientation |
| EpCAM | In either | In either | In either | In either | In either |
| h664 | orientation | orientation | orientation | orientation | orientation |

[0373] In this case, “either orientation” means that either the EpCAM sdABD is N-terminal to the EGFR sdABD in the constructs of the invention or the EpCAM sdABD is C-terminal to it.

[0374] b. EGFR×FOLR1

[0375] In some embodiments, the prodrug protein comprises, from N- to C-terminal: (sdABD-TTA1)-domain linker-aVH-CNCL-aVL-domain linker-(sdABD-TTA2)-CL-iVL-CNCL-iVH-domain linker-(sdABD-HSA). In some embodiments, the aVH, aVL, iVH, iVL have the sequences shown in FIGS. 7A-7B. In some embodiments, the two targeting domains bind to EGFR and FOLR1, and the sdABD-TTAs have the sequences in FIGS. 5A-5B and the sequences provided therein and the corresponding sequence listing. In some embodiments, some combinations of the EGFR sdAb and the FOLR1 sdAb include:

| cross | EGFR1 | hEGFR1 | EGFR2 | EGFR2a | EGFR2d |
|---|---|---|---|---|---|
| FOLR1 | In either | In either | In either | In either | In either |
| h77-2 | orientation | orientation | orientation | orientation | orientation |
| FOLR1 | In either | In either | In either | In either | In either |
| h59.3 | orientation | orientation | orientation | orientation | orientation |
| FOLR | In either | In either | In either | In either | In either |
| h22-4 | orientation | orientation | orientation | orientation | orientation |

[0376] In this case, “either orientation” means that either the FOLR1 sdABD is N-terminal to the EGFR sdABD in the constructs of the invention or the FOLR1 sdABD is C-terminal to it.

[0377] c. EGFR×B7H3

[0378] In some embodiments, the prodrug protein comprises, from N- to C-terminal: (sdABD-TTA1)-domain linker-aVH-CNCL-aVL-domain linker-(sdABD-TTA2)-CL-iVL-CNCL-iVH-domain linker-(sdABD-HSA). In this embodiment, the aVH, aVL, iVH, iVL have the sequences shown in FIGS. 7A-7B. In some embodiments, the two targeting domains bind to EGFR and B7H3, and the sdABD-TTAs have the sequences in FIGS. 5A-5D and the sequences provided therein and the corresponding sequence listing. In some embodiments, some combinations of the EGFR sdABD and the B7H3 sdABD include:

| cross | EGFR1 | hEGFR1 | EGFR2 | EGFR2a | EGFR2d |
|---|---|---|---|---|---|
| B7H3 hF7 | In either | In either | In either | In either | In either |
| | orientation | orientation | orientation | orientation | orientation |
| B7H3 hF12 | In either | In either | In either | In either | In either |
| | orientation | orientation | orientation | orientation | orientation |
| B7H3 hF12 | In either | In either | In either | In either | In either |
| (N57Q) | orientation | orientation | orientation | orientation | orientation |
| B7H3 hF12 | In either | In either | In either | In either | In either |
| (N57E) | orientation | orientation | orientation | orientation | orientation |
| B7H3 hF12 | In either | In either | In either | In either | In either |
| (N57D) | orientation | orientation | orientation | orientation | orientation |
| B7H3 hF12 | In either | In either | In either | In either | In either |
| (S59A) | orientation | orientation | orientation | orientation | orientation |
| B7H3 hF12 | In either | In either | In either | In either | In either |
| (S59Y) | orientation | orientation | orientation | orientation | orientation |

[0379] In this case, “either orientation” means that either the B7H3 sdABD is N-terminal to the EGFR sdABD in the constructs of the invention or the B7H3 sdABD is C-terminal to it.

[0380] d. EGFR×Trop2

[0381] In some embodiments, the prodrug protein comprises, from N- to C-terminal: (sdABD-TTA1)-domain linker-aVH-CNCL-aVL-domain linker-(sdABD-TTA2)-CL-iVL-CNCL-iVH-domain linker-(sdABD-HSA). In some embodiments, the aVH, aVL, iVH, iVL have the sequences shown in FIG. 7. In some embodiments, the two targeting domains bind to EGFR and Trop2, and the sdABD-TTAs have the sequences in FIGS. 5A, 5E and 5F and the sequences provided therein and the corresponding sequence listing. In this embodiments, some combinations of the EGFR sdABD and the Trop2 sdABD include:

| cross | EGFR1 | hEGFR1 | EGFR2 | EGFR2a | EGFR2d |
|---|---|---|---|---|---|
| aTrop2 | In either | In either | In either | In either | In either |
| hVIB557 | orientation | orientation | orientation | orientation | orientation |
| aTrop2 | In either | In either | In either | In either | In either |
| hVIB565 | orientation | orientation | orientation | orientation | orientation |
| aTrop2 | In either | In either | In either | In either | In either |
| hVIB575 | orientation | orientation | orientation | orientation | orientation |
| aTrop2 | In either | In either | In either | In either | In either |
| hVIB578 | orientation | orientation | orientation | orientation | orientation |
| aTrop2 | In either | In either | In either | In either | In either |
| hVIB609 | orientation | orientation | orientation | orientation | orientation |
| aTrop2 | In either | In either | In either | In either | In either |
| hVIB619 | orientation | orientation | orientation | orientation | orientation |

[0382] In this case, “either orientation” means that either the Trop2 sdABD is N-terminal to the EGFR sdABD in the constructs of the invention or the Trop2 sdABD is C-terminal to it.

[0383] e. EGFR×LyPD3

[0384] In some embodiments, the prodrug protein comprises, from N- to C-terminal: (sdABD-TTA1)-domain linker-aVH-CNCL-aVL-domain linker-(sdABD-TTA2)-CL-iVL-CNCL-iVH-domain linker-(sdABD-HSA). In some embodiments, the aVH, aVL, iVH, iVL have the sequences shown in FIGS. 7A-7B. In some embodiments, the two targeting domains bind to EGFR and LyPD3, and the sdABD-TTAs have the sequences in FIGS. 5A, 5G and 5H and the sequences provided therein and the corresponding sequence listing. In this embodiment, some combinations of the EGFR sdABD and the Trop2 sdABD include:

| cross | EGFR1 | hEGFR1 | EGFR2 | EGFR2a | EGFR2d |
|---|---|---|---|---|---|
| aLyPD3 | In either | In either | In either | In either | In either |
| h790 | orientation | orientation | orientation | orientation | orientation |
| aLyPD3 | In either | In either | In either | In either | In either |
| h804 | orientation | orientation | orientation | orientation | orientation |
| aLyPD3 | In either | In either | In either | In either | In either |
| h773 | orientation | orientation | orientation | orientation | orientation |
| aLyPD3 | In either | In either | In either | In either | In either |
| h840 | orientation | orientation | orientation | orientation | orientation |
| aLyPD3 | In either | In either | In either | In either | In either |
| h885 | orientation | orientation | orientation | orientation | orientation |
| aLyPD3 | In either | In either | In either | In either | In either |
| h787 | orientation | orientation | orientation | orientation | orientation |

[0385] In this case, “either orientation” means that either the Trop2 sdABD is N-terminal to the EGFR sdABD in the constructs of the invention or the Trop2 sdABD is C-terminal to it.

[0386] f. EGFR×HER2

[0387] In some embodiments, the prodrug protein comprises, from N- to C-terminal: (sdABD-TTA1)-domain linker-aVH-CNCL-aVL-domain linker-(sdABD-TTA2)-CL-iVL-CNCL-iVH-domain linker-(sdABD-HSA). In some embodiments, the aVH, aVL, iVH, iVL have the sequences shown in FIGS. 7A-7B. In some embodiment, the two targeting domains bind to EGFR and HER2, and the sdABD-TTAs have the sequences in FIGS. 5A, 5H-5M and 75 and the sequences provided therein and the corresponding sequence listing. In this embodiment, some combinations of the EGFR sdABD and the HER2 sdABD include:

| Cross | EGFR1 | hEGFR1 | EGFR2 | EGFR2a | EGFR2d |
|---|---|---|---|---|---|
| aHER2 | In either | In either | In either | In either | In either |
| 1054 | orientation | orientation | orientation | orientation | orientation |
| aHER2 | In either | In either | In either | In either | In either |
| 1055 | orientation | orientation | orientation | orientation | orientation |
| aHER2 | In either | In either | In either | In either | In either |
| 1058 | orientation | orientation | orientation | orientation | orientation |
| aHER2 | In either | In either | In either | In either | In either |
| 1059 | orientation | orientation | orientation | orientation | orientation |
| aHER2 | In either | In either | In either | In either | In either |
| 1065 | orientation | orientation | orientation | orientation | orientation |
| aHER2 | In either | In either | In either | In either | In either |
| 1090 | orientation | orientation | orientation | orientation | orientation |
| aHER2 | In either | In either | In either | In either | In either |
| 1091 | orientation | orientation | orientation | orientation | orientation |
| aHER2 | In either | In either | In either | In either | In either |
| 1092 | orientation | orientation | orientation | orientation | orientation |
| aHER2 | In either | In either | In either | In either | In either |
| 1097 | orientation | orientation | orientation | orientation | orientation |
| aHER2 | In either | In either | In either | In either | In either |
| 1118 | orientation | orientation | orientation | orientation | orientation |
| aHER2 | In either | In either | In either | In either | In either |
| 1121 | orientation | orientation | orientation | orientation | orientation |
| aHER2 | In either | In either | In either | In either | In either |
| 1134 | orientation | orientation | orientation | orientation | orientation |
| aHER2 | In either | In either | In either | In either | In either |
| 1138 | orientation | orientation | orientation | orientation | orientation |
| aHER2 | In either | In either | In either | In either | In either |
| 1139 | orientation | orientation | orientation | orientation | orientation |
| aHER2 | In either | In either | In either | In either | In either |
| 1140 | orientation | orientation | orientation | orientation | orientation |
| aHER2 | In either | In either | In either | In either | In either |
| 1145 | orientation | orientation | orientation | orientation | orientation |
| aHER2 | In either | In either | In either | In either | In either |
| 1146 | orientation | orientation | orientation | orientation | orientation |
| aHER2 | In either | In either | In either | In either | In either |
| 1149 | orientation | orientation | orientation | orientation | orientation |
| aHER2 | In either | In either | In either | In either | In either |
| 1150 | orientation | orientation | orientation | orientation | orientation |
| aHER2 | In either | In either | In either | In either | In either |
| 1156 | orientation | orientation | orientation | orientation | orientation |
| aHER2 | In either | In either | In either | In either | In either |
| 1158 | orientation | orientation | orientation | orientation | orientation |
| aHER2 | In either | In either | In either | In either | In either |
| 1159 | orientation | orientation | orientation | orientation | orientation |
| aHER2 | In either | In either | In either | In either | In either |
| 1160 | orientation | orientation | orientation | orientation | orientation |
| aHER2 | In either | In either | In either | In either | In either |
| 1161 | orientation | orientation | orientation | orientation | orientation |
| aHER2 | In either | In either | In either | In either | In either |
| 1162 | orientation | orientation | orientation | orientation | orientation |
| aHER2 | In either | In either | In either | In either | In either |
| 1163 | orientation | orientation | orientation | orientation | orientation |
| aHER2 | In either | In either | In either | In either | In either |
| h1139 | orientation | orientation | orientation | orientation | orientation |
| aHER2 | In either | In either | In either | In either | In either |
| h1156 | orientation | orientation | orientation | orientation | orientation |
| aHER2 | In either | In either | In either | In either | In either |
| h1159 | orientation | orientation | orientation | orientation | orientation |
| aHER2 | In either | In either | In either | In either | In either |
| h1162 | orientation | orientation | orientation | orientation | orientation |

[0388] In this case, “either orientation” means that either the HER2 sdABD is N-terminal to the EGFR sdABD in the constructs of the invention or C-terminal to it.

[0389] g. EpCAM×FOLR1

[0390] In some embodiments, the prodrug protein comprises, from N- to C-terminal: (sdABD-TTA1)-domain linker-aVH-CNCL-aVL-domain linker-(sdABD-TTA2)-CL-iVL-CNCL-iVH-domain linker-(sdABD-HSA). In some embodiments, the aVH, aVL, iVH, iVL have the sequences shown in FIGS. 7A-7B. In some embodiments, the two targeting domains bind to EpCAM and FOLR1, and the sdABD-TTAs have the sequences in FIGS. 5B, 5D, 5E, and 75 and the sequences provided therein and the corresponding sequence listing. In this embodiment, some combinations of the EpCAM sdABDs and the FOLR1 sdABDs include:

| cross | FOLR1h77-2 | FOLR1 h59.3 | FOLR h22-4 |
|---|---|---|---|
| EpCAM | In either | In either | In either |
| h13 | orientation | orientation | orientation |
| EpCAM | In either | In either | In either |
| h23 | orientation | orientation | orientation |
| EpCAM | In either | In either | In either |
| hVIB665 | orientation | orientation | orientation |
| EpCAM | In either | In either | In either |
| hVIB666 | orientation | orientation | orientation |
| EpCAM | In either | In either | In either |
| h664 | orientation | orientation | orientation |

[0391] In this case, “either orientation” means that either the EpCAM sdABD is N-terminal to the FOLR1 sdABD in the constructs of the invention or the EpCAM sdABD is C-terminal to it.

[0392] h. EpCAM×B7H3

[0393] In some embodiments, the prodrug protein comprises, from N- to C-terminal: (sdABD-TTA1)-domain linker-aVH-CNCL-aVL-domain linker-(sdABD-TTA2)-CL-iVL-CNCL-iVH-domain linker-(sdABD-HSA). In some embodiments, the aVH, aVL, iVH, iVL have the sequences shown in FIGS. 7A-7B. In some embodiments, the two targeting domains bind to EpCAM and B7H3, and the sdABD-TTAs have the sequences in FIGS. 5B-5E and 75 and the sequences provided therein and the corresponding sequence listing. In this embodiment, some combinations of the EpCAM sdABDs and the B37H-3 sdABDs include:

| | | | EpCAM | EpCAM | EpCAM |
|---|---|---|---|---|---|
| cross | EpCAM h13 | EpCAM h23 | hVIB665 | hVIB666 | h664 |
| B7H3 | In either | In either | In either | In either | In either |
| hF7 | orientation | orientation | orientation | orientation | orientation |
| B7H3 | In either | In either | In either | In either | In either |
| hF12 | orientation | orientation | orientation | orientation | orientation |
| B7H3 | In either | In either | In either | In either | In either |
| hF12 | orientation | orientation | orientation | orientation | orientation |
| (N57Q) | | | | | |
| B7H3 | In either | In either | In either | In either | In either |
| hF12 | orientation | orientation | orientation | orientation | orientation |
| (N57E) | | | | | |
| B7H3 | In either | In either | In either | In either | In either |
| hF12 | orientation | orientation | orientation | orientation | orientation |
| (N57D) | | | | | |
| B7H3 | In either | In either | In either | In either | In either |
| hF12 | orientation | orientation | orientation | orientation | orientation |
| (S59A) | | | | | |
| B7H3 | In either | In either | In either | In either | In either |
| hF12 | orientation | orientation | orientation | orientation | orientation |
| (S59Y) | | | | | |

[0394] In this case, “either orientation” means that either the B7H3 sdABD is N-terminal to the EpCAM sdABD in the constructs of the invention or the 7H3 sdABD is C-terminal to it.

[0395] i. EpCAM×Trop2

[0396] In some embodiments, the prodrug protein comprises, from N- to C-terminal: (sdABD-TTA1)-domain linker-aVH-CNCL-aVL-domain linker-(sdABD-TTA2)-CL-iVL-CNCL-iVH-domain linker-(sdABD-HSA). In some embodiments, the aVH, aVL, iVH, iVL have the sequences shown in FIGS. 7A-7B. In some embodiments, the two targeting domains bind to EpCAM and Trop2, and the sdABD-TTAs have the sequences in FIGS. 5D, 5E, 5F, and 75 and the sequences provided therein and the corresponding sequence listing. In this embodiment, preferred combinations of the EpCAM sdABDs and the Trop2 sdABDs include.

| | EpCAM | EpCAM | EpCAM | EpCAM | EpCAM |
|---|---|---|---|---|---|
| cross | h13 | h23 | hVIB665 | hVIB666 | h664 |
| aTrop2 | In either | In either | In either | In either | In either |
| hVIB557 | orientation | orientation | orientation | orientation | orientation |
| aTrop2 | In either | In either | In either | In either | In either |
| hVIB565 | orientation | orientation | orientation | orientation | orientation |
| aTrop2 | In either | In either | In either | In either | In either |
| hVIB575 | orientation | orientation | orientation | orientation | orientation |
| aTrop2 | In either | In either | In either | In either | In either |
| hVIB578 | orientation | orientation | orientation | orientation | orientation |
| aTrop2 | In either | In either | In either | In either | In either |
| hVIB609 | orientation | orientation | orientation | orientation | orientation |
| aTrop2 | In either | In either | In either | In either | In either |
| hVIB619 | orientation | orientation | orientation | orientation | orientation |

[0397] In this case, “either orientation” which means that either the Trop2 sdABD is N-terminal to the EpCAM sdABD in the constructs of the invention or the Trop2 sdABD is C-terminal to it.

[0398] j. EpCAM×LyPD3

[0399] In some embodiments, the prodrug protein comprises, from N- to C-terminal: (sdABD-TTA1)-domain linker-aVH-CNCL-aVL-domain linker-(sdABD-TTA2)-CL-iVL-CNCL-iVH-domain linker-(sdABD-HSA). In some embodiments, the aVH, aVL, iVH, iVL have the sequences shown in FIGS. 7A-7B. In some embodiments, the two targeting domains bind to EpCAM and LyPD3, and the sdABD-TTAs have the sequences in FIGS. 5D, 5E, 5H and 75 and the sequences provided therein and the corresponding sequence listing. In this embodiment, some combinations of the LyPD3 sdABDs and the EpCAM sdABDs include:

| | | | EpCAM | EpCAM | EpCAM |
|---|---|---|---|---|---|
| cross | EpCAM h13 | EpCAM h23 | hVIB665 | hVIB666 | h664 |
| aLyPD3 | In either | In either | In either | In either | In either |
| h790 | orientation | orientation | orientation | orientation | orientation |
| aLyPD3 | In either | In either | In either | In either | In either |
| h804 | orientation | orientation | orientation | orientation | orientation |
| aLyPD3 | In either | In either | In either | In either | In either |
| h773 | orientation | orientation | orientation | orientation | orientation |
| aLyPD3 | In either | In either | In either | In either | In either |
| h840 | orientation | orientation | orientation | orientation | orientation |
| aLyPD3 | In either | In either | In either | In either | In either |
| h885 | orientation | orientation | orientation | orientation | orientation |
| aLyPD3 | In either | In either | In either | In either | In either |
| h787 | orientation | orientation | orientation | orientation | orientation |

[0400] In this case, “either orientation” which means that either the LyPD3 sdABD is N-terminal to the EpCAM sdABD in the constructs of the invention or C-terminal to it.

[0401] k. EpCAM×HER2

[0402] In some embodiments, the prodrug protein comprises, from N- to C-terminal: (sdABD-TTA1)-domain linker-aVH-CNCL-aVL-domain linker-(sdABD-TTA2)-CL-iVL-CNCL-iVH-domain linker-(sdABD-HSA). In some embodiments, the aVH, aVL, iVH, iVL have the sequences shown in FIGS. 7A-7B. In some embodiments, the two targeting domains bind to HER2 and EpCAM, and the sdABD-TTAs have the sequences in FIGS. 5D, 5E, 5H-5M, and 75 and the sequences provided therein and the corresponding sequence listing. In this embodiment, some combinations of the HER2 sdABDs and the EpCAM sdABDs include:

| | | | EpCAM | EpCAM | EpCAM |
|---|---|---|---|---|---|
| cross | EpCAM h13 | EpCAM h23 | hVIB665 | hVIB666 | h664 |
| aHER2 | In either | In either | In either | In either | In either |
| 1054 | orientation | orientation | orientation | orientation | orientation |
| aHER2 | In either | In either | In either | In either | In either |
| 1055 | orientation | orientation | orientation | orientation | orientation |
| aHER2 | In either | In either | In either | In either | In either |
| 1058 | orientation | orientation | orientation | orientation | orientation |
| aHER2 | In either | In either | In either | In either | In either |
| 1059 | orientation | orientation | orientation | orientation | orientation |
| aHER2 | In either | In either | In either | In either | In either |
| 1065 | orientation | orientation | orientation | orientation | orientation |
| aHER2 | In either | In either | In either | In either | In either |
| 1090 | orientation | orientation | orientation | orientation | orientation |
| aHER2 | In either | In either | In either | In either | In either |
| 1091 | orientation | orientation | orientation | orientation | orientation |
| aHER2 | In either | In either | In either | In either | In either |
| 1092 | orientation | orientation | orientation | orientation | orientation |
| aHER2 | In either | In either | In either | In either | In either |
| 1097 | orientation | orientation | orientation | orientation | orientation |
| aHER2 | In either | In either | In either | In either | In either |
| 1118 | orientation | orientation | orientation | orientation | orientation |
| aHER2 | In either | In either | In either | In either | In either |
| 1121 | orientation | orientation | orientation | orientation | orientation |
| aHER2 | In either | In either | In either | In either | In either |
| 1134 | orientation | orientation | orientation | orientation | orientation |
| aHER2 | In either | In either | In either | In either | In either |
| 1138 | orientation | orientation | orientation | orientation | orientation |
| aHER2 | In either | In either | In either | In either | In either |
| 1139 | orientation | orientation | orientation | orientation | orientation |
| aHER2 | In either | In either | In either | In either | In either |
| 1140 | orientation | orientation | orientation | orientation | orientation |
| aHER2 | In either | In either | In either | In either | In either |
| 1145 | orientation | orientation | orientation | orientation | orientation |
| aHER2 | In either | In either | In either | In either | In either |
| 1146 | orientation | orientation | orientation | orientation | orientation |
| aHER2 | In either | In either | In either | In either | In either |
| 1149 | orientation | orientation | orientation | orientation | orientation |
| aHER2 | In either | In either | In either | In either | In either |
| 1150 | orientation | orientation | orientation | orientation | orientation |
| aHER2 | In either | In either | In either | In either | In either |
| 1156 | orientation | orientation | orientation | orientation | orientation |
| aHER2 | In either | In either | In either | In either | In either |
| 1158 | orientation | orientation | orientation | orientation | orientation |
| aHER2 | In either | In either | In either | In either | In either |
| 1159 | orientation | orientation | orientation | orientation | orientation |
| aHER2 | In either | In either | In either | In either | In either |
| 1160 | orientation | orientation | orientation | orientation | orientation |
| aHER2 | In either | In either | In either | In either | In either |
| 1161 | orientation | orientation | orientation | orientation | orientation |
| aHER2 | In either | In either | In either | In either | In either |
| 1162 | orientation | orientation | orientation | orientation | orientation |
| aHER2 | In either | In either | In either | In either | In either |
| 1163 | orientation | orientation | orientation | orientation | orientation |
| aHER2 | In either | In either | In either | In either | In either |
| h1139 | orientation | orientation | orientation | orientation | orientation |
| aHER2 | In either | In either | In either | In either | In either |
| h1156 | orientation | orientation | orientation | orientation | orientation |
| aHER2 | In either | In either | In either | In either | In either |
| h1159 | orientation | orientation | orientation | orientation | orientation |
| aHER2 | In either | In either | In either | In either | In either |
| h1162 | orientation | orientation | orientation | orientation | orientation |

[0403] In this case, “EO” is “either orientation” which means that either the LyPD3 sdABD is N-terminal to the EpCAM sdABD in the constructs of the invention or C-terminal to it.

[0404] 1. FOLR1×B7H3

[0405] In some embodiments, the prodrug protein comprises, from N- to C-terminal: (sdABD-TTA1)-domain linker-aVH-CNCL-aVL-domain linker-(sdABD-TTA2)-CL-iVL-CNCL-iVH-domain linker-(sdABD-HSA). In some embodiments, the aVH, aVL, iVH, iVL have the sequences shown in FIGS. 7A-7B. In some embodiments, the two targeting domains bind to FOLR1 and B7H3, and the sdABD-TTAs have the sequences in FIGS. 5B-5D and the sequences provided therein and the corresponding sequence listing. In this embodiment, some combinations of the FOLR1 sdABDs and the B7H3 sdABDs include:

| cross | FOLR1h77-2 | FOLR1 h59.3 | FOLR h22-4 |
|---|---|---|---|
| B7H3 hF7 | In either | In either | In either |
| | orientation | orientation | orientation |
| B7H3 hF12 | In either | In either | In either |
| | orientation | orientation | orientation |
| B7H3 | In either | In either | In either |
| hF12 (N57Q) | orientation | orientation | orientation |
| B7H3 | In either | In either | In either |
| hF12 (N57E) | orientation | orientation | orientation |
| B7H3 | In either | In either | In either |
| hF12 (N57D) | orientation | orientation | orientation |
| B7H3 | In either | In either | In either |
| hF12 (S59A) | orientation | orientation | orientation |
| B7H3 | In either | In either | In either |
| hF12 (S59Y) | orientation | orientation | orientation |

[0406] In this case, “either orientation” means that either the B7H3 sdABD is N-terminal to the FOLR1 sdABD in the constructs of the invention or C-terminal to it.

[0407] m. FOLR1×HER2

[0408] In some embodiments, the prodrug protein comprises, from N- to C-terminal: (sdABD-TTA1)-domain linker-aVH-CNCL-aVL-domain linker-(sdABD-TTA2)-CL-iVL-CNCL-iVH-domain linker-(sdABD-HSA). In some embodiments, the aVH, aVL, iVH, iVL have the sequences shown in FIGS. 7A-7B. In some embodiments, the two targeting domains bind to FOLR1 and HER2, and the sdABD-TTAs have the sequences in FIGS. 5B, 5H-5M, and 75 and the sequences provided therein and the corresponding sequence listing. In this embodiment, some combinations of the FOLR1 sdABDs and the HER2 sdABDs include:

| Cross | FOLR1h77-2 | FOLR1 h59.3 | FOLR h22-4 |
|---|---|---|---|
| aHER2 | In either | In either | In either |
| 1054 | orientation | orientation | orientation |
| aHER2 | In either | In either | In either |
| 1055 | orientation | orientation | orientation |
| aHER2 | In either | In either | In either |
| 1058 | orientation | orientation | orientation |
| aHER2 | In either | In either | In either |
| 1059 | orientation | orientation | orientation |
| aHER2 | In either | In either | In either |
| 1065 | orientation | orientation | orientation |
| aHER2 | In either | In either | In either |
| 1090 | orientation | orientation | orientation |
| aHER2 | In either | In either | In either |
| 1091 | orientation | orientation | orientation |
| aHER2 | In either | In either | In either |
| 1092 | orientation | orientation | orientation |
| aHER2 | In either | In either | In either |
| 1097 | orientation | orientation | orientation |
| aHER2 | In either | In either | In either |
| 1118 | orientation | orientation | orientation |
| aHER2 | In either | In either | In either |
| 1121 | orientation | orientation | orientation |
| aHER2 | In either | In either | In either |
| 1134 | orientation | orientation | orientation |
| aHER2 | In either | In either | In either |
| 1138 | orientation | orientation | orientation |
| aHER2 | In either | In either | In either |
| 1139 | orientation | orientation | orientation |
| aHER2 | In either | In either | In either |
| 1140 | orientation | orientation | orientation |
| aHER2 | In either | In either | In either |
| 1145 | orientation | orientation | orientation |
| aHER2 | In either | In either | In either |
| 1146 | orientation | orientation | orientation |
| aHER2 | In either | In either | In either |
| 1149 | orientation | orientation | orientation |
| aHER2 | In either | In either | In either |
| 1150 | orientation | orientation | orientation |
| aHER2 | In either | In either | In either |
| 1156 | orientation | orientation | orientation |
| aHER2 | In either | In either | In either |
| 1158 | orientation | orientation | orientation |
| aHER2 | In either | In either | In either |
| 1159 | orientation | orientation | orientation |
| aHER2 | In either | In either | In either |
| 1160 | orientation | orientation | orientation |
| aHER2 | In either | In either | In either |
| 1161 | orientation | orientation | orientation |
| aHER2 | In either | In either | In either |
| 1162 | orientation | orientation | orientation |
| aHER2 | In either | In either | In either |
| 1163 | orientation | orientation | orientation |
| aHER2 | In either | In either | In either |
| h1139 | orientation | orientation | orientation |
| aHER2 | In either | In either | In either |
| h1156 | orientation | orientation | orientation |
| aHER2 | In either | In either | In either |
| h1159 | orientation | orientation | orientation |
| aHER2 | In either | In either | In either |
| h1162 | orientation | orientation | orientation |

[0409] In this case, “either orientation” means that either the HER2 sdABD is N-terminal to the FOLR1 sdABD in the constructs of the invention or the HER2 sdABD is C-terminal to it.

[0410] n. FOLR1×Trop2

[0411] In some embodiments, the prodrug protein comprises, from N- to C-terminal: (sdABD-TTA1)-domain linker-aVH-CNCL-aVL-domain linker-(sdABD-TTA2)-CL-iVL-CNCL-iVH-domain linker-(sdABD-HSA). In some embodiments, the aVH, aVL, iVH, iVL have the sequences shown in FIGS. 7A-7B. In some embodiments, the two targeting domains bind to FOLR1 and Trop2, and the sdABD-TTAs have the sequences in FIGS. 5B, 5E and 5F and the sequences provided therein and the corresponding sequence listing. In this embodiment, preferred combinations of the FOLR1 sdABDs and the Trop2 sdABDs include:

| cross | FOLR1h77-2 | FOLR1 h59.3 | FOLR h22-4 |
|---|---|---|---|
| aTrop2 | In either | In either | In either |
| hVIB557 | orientation | orientation | orientation |
| aTrop2 | In either | In either | In either |
| hVIB565 | orientation | orientation | orientation |
| aTrop2 | In either | In either | In either |
| hVIB575 | orientation | orientation | orientation |
| aTrop2 | In either | In either | In either |
| hVIB578 | orientation | orientation | orientation |
| aTrop2 | In either | In either | In either |
| hVIB609 | orientation | orientation | orientation |

[0412] In this case, “either orientation” means that either the Trop2 sdABD is N-terminal to the FOLR1 sdABD in the constructs of the invention or the Trop2 sdABD is C-terminal to it.

[0413] o. FOLR1×LyPD3

[0414] In some embodiments, the prodrug protein comprises, from N- to C-terminal: (sdABD-TTA1)-domain linker-aVH-CNCL-aVL-domain linker-(sdABD-TTA2)-CL-iVL-CNCL-iVH-domain linker-(sdABD-HSA). In some embodiments, the aVH, aVL, iVH, iVL have the sequences shown in FIGS. 7A-7B. In some embodiments, the two targeting domains bind to FOLR1 and LyPD3, and the sdABD-TTAs have the sequences in FIGS. 5B, 5G and 5H and the sequences provided therein and the corresponding sequence listing. In this embodiment, some combinations of the FOLR1sdABDs and the LyPD3 sdABDs include:

| Cross | FOLR1h77-2 | FOLR1 h59.3 | FOLR h22-4 |
|---|---|---|---|
| aLyPD3 | In either | In either | In either |
| h790 | orientation | orientation | orientation |
| aLyPD3 | In either | In either | In either |
| h804 | orientation | orientation | orientation |
| aLyPD3 | In either | In either | In either |
| h773 | orientation | orientation | orientation |
| aLyPD3 | In either | In either | In either |
| h840 | orientation | orientation | orientation |
| aLyPD3 | In either | In either | In either |
| h885 | orientation | orientation | orientation |
| aLyPD3 | In either | In either | In either |
| h787 | orientation | orientation | orientation |

[0415] In this case, “either orientation” means that either the LyPD3 sdABD is N-terminal to the FOLR1 sdABD in the constructs of the invention or the LyPD3 sdABD is C-terminal to it h

[0416] p. B7H3×HER2

[0417] In some embodiments, the prodrug protein comprises, from N- to C-terminal: (sdABD-TTA1)-domain linker-aVH-CNCL-aVL-domain linker-(sdABD-TTA2)-CL-iVL-CNCL-iVH-domain linker-(sdABD-HSA). In some embodiments, the aVH, aVL, iVH, iVL have the sequences shown in FIGS. 7A-7B. In some embodiments, the two targeting domains bind to B7H3 and HER2, and the sdABD-TTAs have the sequences in FIGS. 5C, 5D, 5H-5M, and 75 and the sequences provided therein and the corresponding sequence listing. In this embodiment, some combinations of the B7H3 sdABDs and the HER2 sdABDs include:

| | | | B7H3 | B7H3 | B7H3 | B7H3 | B7H3 |
|---|---|---|---|---|---|---|---|
| | | B7H3 | hF12 | hF12 | hF12 | hF12 | hF12 |
| Cross | B7H3 hF7 | hF12 | (N57Q) | (N57E) | (N57D) | (S59A) | (S59Y) |
| aHER2 | In either | In either | In either | In either | In either | In either | In either |
| 054 | orientation | orientation | orientation | orientation | orientation | orientation | orientation |
| aHER2 | In either | In either | In either | In either | In either | In either | In either |
| 1055 | orientation | orientation | orientation | orientation | orientation | orientation | orientation |
| aHER2 | In either | In either | In either | In either | In either | In either | In either |
| 1058 | orientation | orientation | orientation | orientation | orientation | orientation | orientation |
| aHER2 | In either | In either | In either | In either | In either | In either | In either |
| 1059 | orientation | orientation | orientation | orientation | orientation | orientation | orientation |
| aHER2 | In either | In either | In either | In either | In either | In either | In either |
| 1065 | orientation | orientation | orientation | orientation | orientation | orientation | orientation |
| aHER2 | In either | In either | In either | In either | In either | In either | In either |
| 1090 | orientation | orientation | orientation | orientation | orientation | orientation | orientation |
| aHER2 | In either | In either | In either | In either | In either | In either | In either |
| 1091 | orientation | orientation | orientation | orientation | orientation | orientation | orientation |
| aHER2 | In either | In either | In either | In either | In either | In either | In either |
| 1092 | orientation | orientation | orientation | orientation | orientation | orientation | orientation |
| aHER2 | In either | In either | In either | In either | In either | In either | In either |
| 1097 | orientation | orientation | orientation | orientation | orientation | orientation | orientation |
| aHER2 | In either | In either | In either | In either | In either | In either | In either |
| 1118 | orientation | orientation | orientation | orientation | orientation | orientation | orientation |
| aHER2 | In either | In either | In either | In either | In either | In either | In either |
| 1121 | orientation | orientation | orientation | orientation | orientation | orientation | orientation |
| aHER2 | In either | In either | In either | In either | In either | In either | In either |
| 1134 | orientation | orientation | orientation | orientation | orientation | orientation | orientation |
| aHER2 | In either | In either | In either | In either | In either | In either | In either |
| 1138 | orientation | orientation | orientation | orientation | orientation | orientation | orientation |
| aHER2 | In either | In either | In either | In either | In either | In either | In either |
| 1139 | orientation | orientation | orientation | orientation | orientation | orientation | orientation |
| aHER2 | In either | In either | In either | In either | In either | In either | In either |
| 1140 | orientation | orientation | orientation | orientation | orientation | orientation | orientation |
| aHER2 | In either | In either | In either | In either | In either | In either | In either |
| 1145 | orientation | orientation | orientation | orientation | orientation | orientation | orientation |
| aHER2 | In either | In either | In either | In either | In either | In either | In either |
| 1146 | orientation | orientation | orientation | orientation | orientation | orientation | orientation |
| aHER2 | In either | In either | In either | In either | In either | In either | In either |
| 1149 | orientation | orientation | orientation | orientation | orientation | orientation | orientation |
| aHER2 | In either | In either | In either | In either | In either | In either | In either |
| 1150 | orientation | orientation | orientation | orientation | orientation | orientation | orientation |
| aHER2 | In either | In either | In either | In either | In either | In either | In either |
| 1156 | orientation | orientation | orientation | orientation | orientation | orientation | orientation |
| aHER2 | In either | In either | In either | In either | In either | In either | In either |
| 1158 | orientation | orientation | orientation | orientation | orientation | orientation | orientation |
| aHER2 | In either | In either | In either | In either | In either | In either | In either |
| 1159 | orientation | orientation | orientation | orientation | orientation | orientation | orientation |
| aHER2 | In either | In either | In either | In either | In either | In either | In either |
| 1160 | orientation | orientation | orientation | orientation | orientation | orientation | orientation |
| aHER2 | In either | In either | In either | In either | In either | In either | In either |
| 1161 | orientation | orientation | orientation | orientation | orientation | orientation | orientation |
| aHER2 | In either | In either | In either | In either | In either | In either | In either |
| 1162 | orientation | orientation | orientation | orientation | orientation | orientation | orientation |
| aHER2 | In either | In either | In either | In either | In either | In either | In either |
| 1163 | orientation | orientation | orientation | orientation | orientation | orientation | orientation |
| aHER2 | In either | In either | In either | In either | In either | In either | In either |
| h1139 | orientation | orientation | orientation | orientation | orientation | orientation | orientation |
| aHER2 | In either | In either | In either | In either | In either | In either | In either |
| h1156 | orientation | orientation | orientation | orientation | orientation | orientation | orientation |
| aHER2 | In either | In either | In either | In either | In either | In either | In either |
| h1159 | orientation | orientation | orientation | orientation | orientation | orientation | orientation |
| aHER2 | In either | In either | In either | In either | In either | In either | In either |
| h1162 | orientation | orientation | orientation | orientation | orientation | orientation | orientation |

[0418] In this case, “either orientation” means that either the HER2 sdABD is N-terminal to the B7H3 sdABD in the constructs of the invention or the HER2 sdABD is C-terminal to it.

[0419] q. B7H3×Trop2

[0420] In some embodiments, the prodrug protein comprises, from N- to C-terminal: (sdABD-TTA1)-domain linker-aVH-CNCL-aVL-domain linker-(sdABD-TTA2)-CL-iVL-CNCL-iVH-domain linker-(sdABD-HSA). In some embodiment, the aVH, aVL, iVH, iVL have the sequences shown in FIGS. 7A-7B. In some embodiment, the two targeting domains bind to B7H3 and Trop2, and the sdABD-TTAs have the sequences in FIGS. 5B-5F and the sequences provided therein and the corresponding sequence listing. In this embodiment, some combinations of the B7H3 sdABDs and the Trop2 sdABDs include:

| | aTrop2 | aTrop2 | aTrop2 | aTrop2 | aTrop2 | aTrop2 |
|---|---|---|---|---|---|---|
| Cross | hVIB557 | hVIB565 | hVIB575 | hVIB578 | hVIB609 | hVIB619 |
| B7H3 hF7 | In either | In either | In either | In either | In either | In either |
| | orientation | orientation | orientation | orientation | orientation | orientation |
| B7H3 hF12 | In either | In either | In either | In either | In either | In either |
| | orientation | orientation | orientation | orientation | orientation | orientation |
| B7H3 hF12 | In either | In either | In either | In either | In either | In either |
| (N57Q) | orientation | orientation | orientation | orientation | orientation | orientation |
| B7H3 hF12 | In either | In either | In either | In either | In either | In either |
| (N57E) | orientation | orientation | orientation | orientation | orientation | orientation |
| B7H3 hF12 | In either | In either | In either | In either | In either | In either |
| (N57D) | orientation | orientation | orientation | orientation | orientation | orientation |
| B7H3 hF12 | In either | In either | In either | In either | In either | In either |
| (S59A) | orientation | orientation | orientation | orientation | orientation | orientation |
| B7H3 hF12 | In either | In either | In either | In either | In either | In either |
| (S59Y) | orientation | orientation | orientation | orientation | orientation | orientation |

[0421] In this case, “either orientation” means that either the Trop2 sdABD is N-terminal to the B7H3 sdABD in the constructs of the invention or the Trop2 sdABD is C-terminal to it.

[0422] r. B7H3×LyPD3

[0423] In some embodiments, the prodrug protein comprises, from N- to C-terminal: (sdABD-TTA1)-domain linker-aVH-CNCL-aVL-domain linker-(sdABD-TTA2)-CL-iVL-CNCL-iVH-domain linker-(sdABD-HSA). In some embodiments, the aVH, aVL, iVH, iVL have the sequences shown in FIGS. 7A-7B. In some embodiment, the two targeting domains bind to B7H3 and LyPD3, and the sdABD-TTAs have the sequences in FIGS. 5B-5D, 5G, and 5H and the sequences provided therein and the corresponding sequence listing. In this embodiment, some combinations of the B7H3 sdABDs and the LyPD3 sdABDs include:

| | aLyPD3 | aLyPD3 | aLyPD3 | aLyPD3 | aLyPD3 | aLyPD3 |
|---|---|---|---|---|---|---|
| Cross | h787 | h790 | h804 | h773 | h840 | h885 |
| B7H3 hF7 | In either | In either | In either | In either | In either | In either |
| | orientation | orientation | orientation | orientation | orientation | orientation |
| B7H3 hF12 | In either | In either | In either | In either | In either | In either |
| | orientation | orientation | orientation | orientation | orientation | orientation |
| B7H3 hF12 | In either | In either | In either | In either | In either | In either |
| (N57Q) | orientation | orientation | orientation | orientation | orientation | orientation |
| B7H3 hF12 | In either | In either | In either | In either | In either | In either |
| (N57E) | orientation | orientation | orientation | orientation | orientation | orientation |
| B7H3 hF12 | In either | In either | In either | In either | In either | In either |
| (N57D) | orientation | orientation | orientation | orientation | orientation | orientation |
| B7H3 hF12 | In either | In either | In either | In either | In either | In either |
| (S59A) | orientation | orientation | orientation | orientation | orientation | orientation |
| B7H3 hF12 | In either | In either | In either | In either | In either | In either |
| (S59Y) | orientation | orientation | orientation | orientation | orientation | orientation |

[0424] In this case, “either orientation” means that either the LyPD3 sdABD is N-terminal to the B7H3 sdABD in the constructs of the invention or the LyPD3 sdABD is C-terminal to it.

[0425] s. HER2×Trop2

[0426] In some embodiments, the prodrug protein comprises, from N- to C-terminal: (sdABD-TTA1)-domain linker-aVH-CNCL-aVL-domain linker-(sdABD-TTA2)-CL-iVL-CNCL-iVH-domain linker-(sdABD-HSA). In some embodiment, the aVH, aVL, iVH, iVL have the sequences shown in FIGS. 7A-7B. In some embodiment, the two targeting domains bind to HER2 and Trop2, and the sdABD-TTAs have the sequences in FIGS. 5E, 5F, 5H-5M, and 75 and the sequences provided therein and the corresponding sequence listing. In this embodiment, some combinations of the HER2 sdABDs and the Trop2 sdABDs include.

| | aTrop2 | aTrop2 | aTrop2 | aTrop2 | aTrop2 | aTrop2 |
|---|---|---|---|---|---|---|
| Cross | hVIB557 | hVIB565 | hVIB575 | hVIB578 | hVIB609 | hVIB619 |
| aHER2 | In either | In either | In either | In either | In either | In either |
| 1054 | orientation | orientation | orientation | orientation | orientation | orientation |
| aHER2 | In either | In either | In either | In either | In either | In either |
| 1055 | orientation | orientation | orientation | orientation | orientation | orientation |
| aHER2 | In either | In either | In either | In either | In either | In either |
| 1058 | orientation | orientation | orientation | orientation | orientation | orientation |
| aHER2 | In either | In either | In either | In either | In either | In either |
| 1059 | orientation | orientation | orientation | orientation | orientation | orientation |
| aHER2 | In either | In either | In either | In either | In either | In either |
| 1065 | orientation | orientation | orientation | orientation | orientation | orientation |
| aHER2 | In either | In either | In either | In either | In either | In either |
| 1090 | orientation | orientation | orientation | orientation | orientation | orientation |
| aHER2 | In either | In either | In either | In either | In either | In either |
| 1091 | orientation | orientation | orientation | orientation | orientation | orientation |
| aHER2 | In either | In either | In either | In either | In either | In either |
| 1092 | orientation | orientation | orientation | orientation | orientation | orientation |
| aHER2 | In either | In either | In either | In either | In either | In either |
| 1097 | orientation | orientation | orientation | orientation | orientation | orientation |
| aHER2 | In either | In either | In either | In either | In either | In either |
| 1118 | orientation | orientation | orientation | orientation | orientation | orientation |
| aHER2 | In either | In either | In either | In either | In either | In either |
| 1121 | orientation | orientation | orientation | orientation | orientation | orientation |
| aHER2 | In either | In either | In either | In either | In either | In either |
| 1134 | orientation | orientation | orientation | orientation | orientation | orientation |
| aHER2 | In either | In either | In either | In either | In either | In either |
| 1138 | orientation | orientation | orientation | orientation | orientation | orientation |
| aHER2 | In either | In either | In either | In either | In either | In either |
| 1139 | orientation | orientation | orientation | orientation | orientation | orientation |
| aHER2 | In either | In either | In either | In either | In either | In either |
| 1140 | orientation | orientation | orientation | orientation | orientation | orientation |
| aHER2 | In either | In either | In either | In either | In either | In either |
| 1145 | orientation | orientation | orientation | orientation | orientation | orientation |
| aHER2 | In either | In either | In either | In either | In either | In either |
| 1146 | orientation | orientation | orientation | orientation | orientation | orientation |
| aHER2 | In either | In either | In either | In either | In either | In either |
| 1149 | orientation | orientation | orientation | orientation | orientation | orientation |
| aHER2 | In either | In either | In either | In either | In either | In either |
| 1150 | orientation | orientation | orientation | orientation | orientation | orientation |
| aHER2 | In either | In either | In either | In either | In either | In either |
| 1156 | orientation | orientation | orientation | orientation | orientation | orientation |
| aHER2 | In either | In either | In either | In either | In either | In either |
| 1158 | orientation | orientation | orientation | orientation | orientation | orientation |
| aHER2 | In either | In either | In either | In either | In either | In either |
| 1159 | orientation | orientation | orientation | orientation | orientation | orientation |
| aHER2 | In either | In either | In either | In either | In either | In either |
| 1160 | orientation | orientation | orientation | orientation | orientation | orientation |
| aHER2 | In either | In either | In either | In either | In either | In either |
| 1161 | orientation | orientation | orientation | orientation | orientation | orientation |
| aHER2 | In either | In either | In either | In either | In either | In either |
| 1162 | orientation | orientation | orientation | orientation | orientation | orientation |
| aHER2 | In either | In either | In either | In either | In either | In either |
| 1163 | orientation | orientation | orientation | orientation | orientation | orientation |
| aHER2 | In either | In either | In either | In either | In either | In either |
| h1139 | orientation | orientation | orientation | orientation | orientation | orientation |
| aHER2 | In either | In either | In either | In either | In either | In either |
| h1156 | orientation | orientation | orientation | orientation | orientation | orientation |
| aHER2 | In either | In either | In either | In either | In either | In either |
| h1159 | orientation | orientation | orientation | orientation | orientation | orientation |
| aHER2 | In either | In either | In either | In either | In either | In either |
| h1162 | orientation | orientation | orientation | orientation | orientation | orientation |

[0427] In this case, “either orientation” means that either the HER2 sdABD is N-terminal to the Trop2 sdABD in the constructs of the invention or the HER2 sdABD is C-terminal to it.

[0428] t. HER2×LyPD3

[0429] In some embodiments, the prodrug protein comprises, from N- to C-terminal: (sdABD-TTA1)-domain linker-aVH-CNCL-aVL-domain linker-(sdABD-TTA2)-CL-iVL-CNCL-iVH-domain linker-(sdABD-HSA). In some embodiments, the aVH, aVL, iVH, iVL have the sequences shown in FIGS. 7A-7B. In some embodiments, the two targeting domains bind to HER2 and LyPD3, and the sdABD-TTAs have the sequences in FIGS. 5G, 5H-5M and 75 and the sequences provided therein and the corresponding sequence listing. In this embodiment, some combinations of the HER2 sdABDs and the LyPD3 sdABDs include:

| | aLyPD3 | aLyPD3 | aLyPD3 | aLyPD3 | aLyPD3 | aLyPD3 |
|---|---|---|---|---|---|---|
| cross | h790 | h790 | h790 | h790 | h790 | h790 |
| aHER2 | In either | In either | In either | In either | In either | In either |
| 1054 | orientation | orientation | orientation | orientation | orientation | orientation |
| aHER2 | In either | In either | In either | In either | In either | In either |
| 1055 | orientation | orientation | orientation | orientation | orientation | orientation |
| aHER2 | In either | In either | In either | In either | In either | In either |
| 1058 | orientation | orientation | orientation | orientation | orientation | orientation |
| aHER2 | In either | In either | In either | In either | In either | In either |
| 1059 | orientation | orientation | orientation | orientation | orientation | orientation |
| aHER2 | In either | In either | In either | In either | In either | In either |
| 1065 | orientation | orientation | orientation | orientation | orientation | orientation |
| aHER2 | In either | In either | In either | In either | In either | In either |
| 1090 | orientation | orientation | orientation | orientation | orientation | orientation |
| aHER2 | In either | In either | In either | In either | In either | In either |
| 1091 | orientation | orientation | orientation | orientation | orientation | orientation |
| aHER2 | In either | In either | In either | In either | In either | In either |
| 1092 | orientation | orientation | orientation | orientation | orientation | orientation |
| aHER2 | In either | In either | In either | In either | In either | In either |
| 1097 | orientation | orientation | orientation | orientation | orientation | orientation |
| aHER2 | In either | In either | In either | In either | In either | In either |
| 1118 | orientation | orientation | orientation | orientation | orientation | orientation |
| aHER2 | In either | In either | In either | In either | In either | In either |
| 1121 | orientation | orientation | orientation | orientation | orientation | orientation |
| aHER2 | In either | In either | In either | In either | In either | In either |
| 1134 | orientation | orientation | orientation | orientation | orientation | orientation |
| aHER2 | In either | In either | In either | In either | In either | In either |
| 1138 | orientation | orientation | orientation | orientation | orientation | orientation |
| aHER2 | In either | In either | In either | In either | In either | In either |
| 1139 | orientation | orientation | orientation | orientation | orientation | orientation |
| aHER2 | In either | In either | In either | In either | In either | In either |
| 1140 | orientation | orientation | orientation | orientation | orientation | orientation |
| aHER2 | In either | In either | In either | In either | In either | In either |
| 1145 | orientation | orientation | orientation | orientation | orientation | orientation |
| aHER2 | In either | In either | In either | In either | In either | In either |
| 1146 | orientation | orientation | orientation | orientation | orientation | orientation |
| aHER2 | In either | In either | In either | In either | In either | In either |
| 1149 | orientation | orientation | orientation | orientation | orientation | orientation |
| aHER2 | In either | In either | In either | In either | In either | In either |
| 1150 | orientation | orientation | orientation | orientation | orientation | orientation |
| aHER2 | In either | In either | In either | In either | In either | In either |
| 1156 | orientation | orientation | orientation | orientation | orientation | orientation |
| aHER2 | In either | In either | In either | In either | In either | In either |
| 1158 | orientation | orientation | orientation | orientation | orientation | orientation |
| aHER2 | In either | In either | In either | In either | In either | In either |
| 1159 | orientation | orientation | orientation | orientation | orientation | orientation |
| aHER2 | In either | In either | In either | In either | In either | In either |
| 1160 | orientation | orientation | orientation | orientation | orientation | orientation |
| aHER2 | In either | In either | In either | In either | In either | In either |
| 1161 | orientation | orientation | orientation | orientation | orientation | orientation |
| aHER2 | In either | In either | In either | In either | In either | In either |
| 1162 | orientation | orientation | orientation | orientation | orientation | orientation |
| aHER2 | In either | In either | In either | In either | In either | In either |
| 1163 | orientation | orientation | orientation | orientation | orientation | orientation |
| aHER2 | In either | In either | In either | In either | In either | In either |
| h1139 | orientation | orientation | orientation | orientation | orientation | orientation |
| aHER2 | In either | In either | In either | In either | In either | In either |
| h1156 | orientation | orientation | orientation | orientation | orientation | orientation |
| aHER2 | In either | In either | In either | In either | In either | In either |
| h1159 | orientation | orientation | orientation | orientation | orientation | orientation |
| aHER2 | In either | In either | In either | In either | In either | In either |
| h1162 | orientation | orientation | orientation | orientation | orientation | orientation |

[0430] In this case, “either orientation” means that either the HER2 sdABD is N-terminal to the Trop2 sdABD in the constructs of the invention or C-terminal to it.

[0431] u. Trop2×LyPD3

[0432] In some embodiments, the prodrug protein comprises, from N- to C-terminal: (sdABD-TTA1)-domain linker-aVH-CNCL-aVL-domain linker-(sdABD-TTA2)-CL-iVL-CNCL-iVH-domain linker-(sdABD-HSA). In some embodiments, the aVH, aVL, iVH, iVL have the sequences shown in FIGS. 7A-7B. In some embodiments, the two targeting domains bind to Trop2 and LyPD3, and the sdABD-TTAs have the sequences in FIGS. 5E-5G and 5H and the sequences provided therein and the corresponding sequence listing. In this embodiment, some combinations of the Trop2 sdABDs and the LyPD3 sdABDs include:

| | aTrop2 | aTrop2 | aTrop2 | aTrop2 | aTrop2 | aTrop2 |
|---|---|---|---|---|---|---|
| cross | hVIB557 | hVIB565 | hVIB575 | hVIB578 | hVIB609 | hVIB619 |
| aLyPD3 | In either | In either | In either | In either | In either | In either |
| h787 | orientation | orientation | orientation | orientation | orientation | orientation |
| aLyPD3 | In either | In either | In either | In either | In either | In either |
| h790 | orientation | orientation | orientation | orientation | orientation | orientation |
| aLyPD3 | In either | In either | In either | In either | In either | In either |
| h804 | orientation | orientation | orientation | orientation | orientation | orientation |
| aLyPD3 | In either | In either | In either | In either | In either | In either |
| h773 | orientation | orientation | orientation | orientation | orientation | orientation |
| aLyPD3 | In either | In either | In either | In either | In either | In either |
| h840 | orientation | orientation | orientation | orientation | orientation | orientation |
| aLyPD3 | In either | In either | In either | In either | In either | In either |
| h885 | orientation | orientation | orientation | orientation | orientation | orientation |

[0433] In this case, “either orientation” means that either the Trop2 sdABD is N-terminal to the LyPD3 sdABD in the constructs of the invention or the Trop2 sdABD is C-terminal to it.

[0434] In some embodiments, the prodrug protein comprises, from N- to C-terminal: (sdABD-TTA1)-domain linker-aVH-CNCL-aVL-domain linker-(sdABD-TTA2)-CL-iVL-CNCL-iVH-domain linker-(sdABD-HSA). In this embodiment, the aVH, aVL, iVH, iVL have the sequences shown in FIGS. 7A-7B. In some embodiments, the two targeting domains bind to the same TTA, which can be EGFR, FOLR1, B7H3, CA9, Trop2, LyPD3, HER2 or EpCAM, the sequences for which are depicted in FIGS. 5A-M and 75, and the CCL and CL is selected from a linker that is cleaved by MMP9 or meprin, and the sdABD(½) has SEQ ID NO:249.

[0435] In Format 2, a preferred domain linker is SEQ ID NO:287 (which also serves as a preferred constrained non cleavable linker).

[0436] B. Cleavable Formats with Dual Targeting

[0437] The invention provides non-isomerizing cleavable formats of the “format 1” type in FIG. 1. In this embodiment, the constrained Fv domain comprise VH and VL domains that are linked using constrained cleavable linkers and the constrained pseudo Fv domain uses constrained non-cleavable linkers. For ease of discussion, both of these are referred to herein as “constrained”, but as discussed above and shown in FIG. 37, FIG. 38 and FIG. 39 of WO2019/051102, only one of these needs to be constrained, although generally, when both linkers are constrained, the protein has better expression.

[0438] All constructs in Format 1 (as well as the other formats) also have a cleavable linker (CL) that is cleaved by a human tumor protease.

[0439] The invention provides prodrug proteins, comprising, from N- to C-terminal, (sdABD-TTA1)-domain linker-constrained Fv domain-domain linker-(sdABD-TTA2)-CL-constrained pseudo Fv domain-domain linker-(sdABD-HSA).

[0440] As will be appreciated by those in the art, the order of the VH and VL in either a constrained Fv domain or a constrained pseudo Fv domain can be either (N- to C-terminal) VH-linker-VL or VL-linker-VH.

[0441] Thus, in one embodiment, the prodrug protein comprises, from N- to C-terminal: (sdABD-TTA1)-domain linker-aVH-CCL-aVL-domain linker-(sdABD-TTA2)-CL-iVL-CNCL-iVH-domain linker-(sdABD-HSA).

[0442] Thus, in one embodiment, the prodrug protein comprises, from N- to C-terminal: (sdABD-TTA1)-domain linker-aVH-CCL-aVL-domain linker-(sdABD-TTA2)-CL-iVH-CCL-iVL-domain linker-sdABD-HSA.

[0443] Thus, in one embodiment, the prodrug protein comprises, from N- to C-terminal: (sdABD-TTA1)-domain linker-aVL-CCL-aVH-domain linker-(sdABD-TTA2)-CL-iVL-CCL-iVH-domain linker-(sdABD-HSA).

[0444] Thus, in one embodiment, the prodrug protein comprises, from N- to C-terminal: (sdABD-TTA1)-domain linker-aVL-CCL-aVH-domain linker-(sdABD-TTA2)-CL-iVH-CCL-iVL-domain linker-(sdABD-HSA).

[0445] In some embodiments, the prodrug construct comprises sdABD(TTA1)-domain linker-aVH-CCL-aVL-domain linker-sdABD(TTA2)-CL-iVL-CNCL-iVH-NCL-sdABD(½). In this embodiment, the aVH, aVL, iVH and iVL have the sequences shown in FIGS. 7A-7B.

[0446] In some embodiments, the prodrug construct comprises sdABD(TTA1)-domain linker-aVH-CCL-aVL-domain linker-sdABD(TTA2)-CL-iVL-CNCL-iVH-domain linker-sdABD(½). In this embodiment, the aVH, aVL, iVH, iVL have the sequences shown in FIGS. 7A-7B. In this embodiment, the two targeting domains bind to the same TTA, which can be EGFR, EpCAM, FOLR1, Trop2, CA9, LyPD3, HER2 or B7H3, the sequences for which are depicted in FIGS. 5A-5M and 75.

[0447] In some embodiments, the prodrug construct comprises sdABD(TTA1)-domain linker-aVH-CCL-aVL-domain linker-sdABD(TTA2)-CL-iVL-CNCL-iVH-domain linker-sdABD(½). In this embodiment, the aVH, aVL, iVH, iVL have the sequences shown in FIGS. 7A-7B. In this embodiment, the two targeting domains bind to different TTAs.

[0448] In some embodiments, the prodrug construct comprises sdABD(TTA1)-domain linker-aVH-CCL-aVL-domain linker-sdABD(TTA2)-CL-iVL-CNCL-iVH-domain linker-sdABD(½). In this embodiment, the aVH, aVL, iVH, iVL have the sequences shown in FIGS. 7A-7B. In this embodiment, the two targeting domains bind to EGFR and EpCAM, and the sdABD-TTAs have the sequences in FIGS. 5A-5M and 75.

[0449] In some embodiments, the prodrug construct comprises sdABD(TTA1)-domain linker-aVH-CCL-aVL-domain linker-sdABD(TTA2)-CL-iVL-CNCL-iVH-domain linker-sdABD(½). In this embodiment, the aVH, aVL, iVH, iVL have the sequences shown in FIGS. 7A-7B. In this embodiment, the two targeting domains bind to EGFR and FOLR1, and the sdABD-TTAs have the sequences in FIGS. 5A-5M and 75.

[0450] In some embodiments, the prodrug construct comprises sdABD(TTA1)-domain linker-aVH-CCL-aVL-domain linker-sdABD(TTA2)-CL-iVL-CNCL-iVH-domain linker-sdABD(½). In this embodiment, the aVH, aVL, iVH, iVL have the sequences shown in FIGS. 7A-7B. In this embodiment, the two targeting domains bind to EGFR and B7H3, and the sdABD-TTAs have the sequences in FIGS. 5A-5M and 75.

[0451] In some embodiments, the prodrug construct comprises sdABD(TTA1)-domain linker-aVH-CCL-aVL-domain linker-sdABD(TTA2)-CL-iVL-CNCL-iVH-domain linker-sdABD(½). In this embodiment, the aVH, aVL, iVH, iVL have the sequences shown in FIGS. 7A-7B. In this embodiment, the two targeting domains bind to EpCAM and FOLR1, and the sdABD-TTAs have the sequences in FIGS. 5A-5M and 75.

[0452] In some embodiments, the prodrug construct comprises sdABD(TTA1)-domain linker-aVH-CCL-aVL-domain linker-sdABD(TTA2)-CL-iVL-CNCL-iVH-domain linker-sdABD(½). In this embodiment, the aVH, aVL, iVH, iVL have the sequences shown in FIGS. 7A-7B. In this embodiment, the two targeting domains bind to EpCAM and B7H3, and the sdABD-TTAs have the sequences in FIGS. 5A-5M and 75.

[0453] In some embodiments, the prodrug construct comprises sdABD(TTA1)-domain linker-aVH-CCL-aVL-domain linker-sdABD(TTA2)-CL-iVL-CNCL-iVH-domain linker-sdABD(½). In this embodiment, the aVH, aVL, iVH, iVL have the sequences shown in FIGS. 7A-7B. In this embodiment, the two targeting domains bind to B7H3 and FOLR1, and the sdABD-TTAs have the sequences in FIGS. 5A-5M and 75.

[0454] In some embodiments, the prodrug construct comprises sdABD(TTA1)-domain linker-aVH-CCL-aVL-domain linker-sdABD(TTA2)-CL-iVL-CNCL-iVH-domain linker-sdABD(½). In this embodiment, the aVH, aVL, iVH, iVL have the sequences shown in FIG. 7. In this embodiment, the two targeting domains bind to the same TTA, which can be EGFR, FOLR1, B7H3, Trop2, CA9, LyPD3, HER2 or EpCAM, the sequences for which are depicted in FIG. 5, and the CCL and CL is selected from a linker that is cleaved by MMP9 or meprin, and the sdABD(½) has SEQ ID NO:245 or SEQ ID NO:249.

[0455] In Format 1, a preferred domain linker is SEQ ID NO:287 (which also serves as a preferred constrained non cleavable linker).

[0456] C. Single TTA Constructs

[0457] As is shown in FIG. 4, “format 4” constructs are also included in the compositions of the invention, that are similar to Format 2 constructs but without a second TTA ABD. In this embodiment, it is understood that the “non-cleavable” applies only to the linkage of the constrained Fv domain, as there is the activating cleavage site in the prodrug construct. In this embodiment, the constrained Fv domain comprise VH and VL domains that are linked using constrained non-cleavable linkers and the constrained pseudo Fv domain uses constrained non-cleavable linkers.

[0458] As will be appreciated by those in the art, the order of the VH and VL in either a constrained Fv domain or a constrained pseudo Fv domain can be either (N- to C-terminal) VH-linker-VL or VL-linker-VH.

[0459] The invention provides prodrug proteins, comprising, from N- to C-terminal: (sdABD-TTA)-domain linker-constrained Fv domain-cleavable linker-(sdABD-HSA)-constrained pseudo Fv domain. Note that for all constructs for this format, the sdABD-HSA does not generally have a His6 tag, although it can be included.

[0460] As will be appreciated by those in the art, the order of the VH and VL in either a constrained Fv domain or a constrained pseudo Fv domain can be either (N- to C-terminal) VH-linker-VL or VL-linker-VH.

[0461] Thus, in one embodiment, the prodrug protein comprises, from N- to C-terminal: (sdABD-TTA)-domain linker-aVH-CNCL-aVL-CL-(sdABD-HSA)-domain linker-iVL-CNCL-iVH.

[0462] Thus, in one embodiment, the prodrug protein comprises, from N- to C-terminal: (sdABD-TTA)-domain linker-aVH-CNCL-aVL-CL-(sdABD-HSA)-domain linker-iVH-CNCL-iVL.

[0463] Thus, in one embodiment, the prodrug protein comprises, from N- to C-terminal: (sdABD-TTA)-domain linker-aVL-CNCL-aVH-CL-(sdABD-HSA)-domain linker-iVH-CNCL-iVL.

[0464] Thus, in one embodiment, the prodrug protein comprises, from N- to C-terminal: (sdABD-TTA)-domain linker-aVL-CNCL-aVH-CL-(sdABD-HSA)-domain linker-iVL-CNCL-iVH.

[0465] Thus, in one embodiment, the prodrug protein comprises, from N- to C-terminal: (sdABD-TTA)-domain linker-aVH-CNCL-aVL-CL-(sdABD-HSA)-domain linker-iVL-CNCL-iVH. In this embodiment, the aVH, aVL, iVH, iVL have the sequences shown in FIGS. 7A-7B. In this embodiment, the targeting domain binds to a TTA which can be EGFR, EpCAM, FOLR1, Trop2, CA9, LyPD3, HER2 or B7H3, the sequences for which are depicted in FIGS. 5A-5M and 75.

[0466] D. Two Protein Compositions

[0467] In some embodiments, the compositions of the invention comprise two different molecules, sometimes referred to as “hemi-COBRAs™”, or “hemi-constructs”, that in the absence of cleavage, intramolecularly associate to form pseudo-Fvs. In the presence of the protease, the cleavage sites are cleaved, releasing the inert variable domains, and the protein pair then forms an active antigen binding domain to CD3, as generally depicted in FIG. 3.

[0468] What is important in the design of the hemi-constructs is that the active variable domain and the sdABD-TTA remain together after cleavage, such that the two cleaved portions are held together by the tumor antigen receptor on the tumor surface and then can form an active anti-CD3 binding domain.

[0469] There are two different general Format 3 constructs, those wherein each member of the pair has a single sdABD-TTA (FIG. 3A) and those with two different sdABD-TTAs, each to a different TTA (FIG. 3B).

[0470] 1. Hemi-COBRA™ Constructs with Single TTA Binding Domains (Format 3A)

[0471] In some embodiments, the first hemi-COBRA™ has, from N- to C-terminal, sdABD(TTA1)-domain linker-aVH-CL-iVL-domain linker-sdABD(½) and the second has sdABD(½)-domain linker-iVH-CL-aVL-domain linker-sdABD(TTA2). In this embodiment, the aVH, aVL, iVH, iVL and sdABD(½) have the sequences shown in FIGS. 6 and 7, and the sdABD-TTAa bind to human EGFR, EpCAM, Trop2, CA9, LyPD3, HER2, FOLR1 and/or B7H3, and has a sequence depicted in FIGS. 5A-5M and 75.

[0472] 2. Hemi-COBRA™ Constructs with Dual TTA ABDs

[0473] In some embodiments, the paired pro-drug constructs can have two sdABD-TTA binding domains per construct, as is shown in FIG. 3B. In this embodiments, the first member of the pair comprises, from N- to C-terminal, sdABD-TTA1-domain linker-sdABD-TTA2-domain linker-aVH-CL-iVL-domain linker-sdABD(HAS), and the second member comprises, from N- to C-terminal, sdABD-TTA1-domain linker-sdABD-TTA2-aVL-CL-iVH-domain linker-(sdABD-HSA).

[0474] The two sdABD-TTAs on each member of the pair are different, but generally both members (hemi-COBRAs™) have the same two sdABD-TTAs, e.g. both have EGFR and FOLR1 or EGFR and B7H3, etc.

[0475] The two sdABD-TTAs are in some embodiments selected from the ones shown in FIGS. 5A-5M and 75.

### IV. Methods of Making the Compositions of the Invention

[0476] The pro-drug compositions of the invention are made as will generally be appreciated by those in the art and outlined below.

[0477] The invention provides nucleic acid compositions that encode the pro-drug compositions of the invention. As will be appreciated by those in the art, the nucleic acid compositions will depend on the format of the pro-drug polypeptide(s). Thus, for example, when the format requires two amino acid sequences, such as the “format 3” constructs, two nucleic acid sequences can be incorporated into one or more expression vectors for expression. Similarly, prodrug constructs that are a single polypeptide (formats 1, 2 and 4), need a single nucleic acid in a single expression vector for production.

[0478] As is known in the art, the nucleic acids encoding the components of the invention can be incorporated into expression vectors as is known in the art, and depending on the host cells used to produce the prodrug compositions of the invention. Generally, the nucleic acids are operably linked to any number of regulatory elements (promoters, origin of replication, selectable markers, ribosomal binding sites, inducers, etc.). The expression vectors can be extra-chromosomal or integrating vectors.

[0479] The nucleic acids and/or expression vectors of the invention are then transformed into any number of different types of host cells as is well known in the art, including mammalian, bacterial, yeast, insect and/or fungal cells, with mammalian cells (e.g. CHO cells, 293 cells), finding use in many embodiments.

[0480] The prodrug compositions of the invention are made by culturing host cells comprising the expression vector(s) as is well known in the art. Once produced, traditional antibody purification steps are done, including an protein A affinity chromatography step and/or an ion exchange chromatography step.

### V. Formulation and Administration of the Pro-Drug Compositions

[0481] Formulations of the pro-drug compositions used in accordance with the present invention are prepared for storage by mixing the pro-drugs (single proteins in the case of formats 1, 2 and 4 and two proteins in the case of format 3) having the desired degree of purity with optional pharmaceutically acceptable carriers, excipients or stabilizers (as generally outlined in Remington's Pharmaceutical Sciences 16th edition, Osol, A. Ed. [1980]), in the form of lyophilized formulations or aqueous solutions.

[0482] The pro-drug compositions of the invention are administered to a subject, in accord with known methods, such as intravenous administration as a bolus or by continuous infusion over a period of time.

[0483] The pro-drug compositions of the invention are useful in the treatment of cancer. Provided herein are methods of treating cancer in a patient comprising any of the pro-drug compositions described. Described herein is a pro-drug composition for use as a medicament. Provided is a pharmaceutical composition for treating cancer comprising any of the pro-drug compositions described. Provided is a pharmaceutical composition comprising any of the pro-drug compositions described for treating cancer in a patient in need thereof. Provided is a pro-drug composition as described for the treatment or for the use in a method for treating cancer. Provided is a pro-drug composition described herein for treating cancer in a patient in need thereof. Provided is the use of a pro-drug composition in the manufacture of a medicament for the treatment of cancer.

### VI. Exemplary Embodiments

[0484] The present invention provides a number of different protein compositions for the treatment of cancer. Accordingly, in one aspect, the invention provides “Format 2” proteins comprising, from N- to C-terminal: a first single domain antigen binding domain (sdABD) that binds to a human tumor target antigen (TTA) (sdABD-TTA); b) a domain linker; c) a constrained Fv domain comprising: i) a variable heavy domain comprising a vhCDR1, vhCDR2 and vhCDR3; ii) a constrained non-cleavable linker (CNCL); and iii) a variable light domain comprising vlCDR1, vlCDR2 and vlCDR3; d) a second domain linker; e) a second sdABD-TTA; f) a cleavable linker (CL); g) a constrained pseudo Fv domain comprising: i) a pseudo light variable domain; ii) a constrained non-cleavable linker (CNCL); and iii) a pseudo heavy variable domain; h) a third domain linker; and i) a third sdABD that binds to human serum albumin; wherein the variable heavy domain and the variable light domain are capable of binding human CD3 but the constrained Fv domain does not bind CD3; the variable heavy domain and the pseudo variable light domain intramolecularly associate to form an inactive Fv; and the variable light domain and the pseudo variable heavy domain intramolecularly associate to form an inactive Fv. In some embodiments, the human tumor target antigen is B7H3.

[0485] In a further aspect, the invention provides proteins comprising, from N- to C-terminal: a first single domain antigen binding domain (sdABD) that binds to a human tumor target antigen (TTA) (sdABD-TTA) comprising sdFR1-sdCDR1-sdFR2-sdCDR2-sdFR3-sdCDR3-sdFR4; b) a first domain linker; c) a constrained Fv domain comprising: i) a variable heavy domain comprising vhFR1-vhCDR1-vhFR2-vhCDR2-vhFR3-vhCDR3-vhFR4; ii) a constrained non-cleavable linker (CNCL); and iii) a variable light domain comprising vlFR1-vlCDR1-vlFR2-vlCDR2-vlFR3-vlCDR3-vlFR4; d) a second domain linker; e) a second sdABD-TTA; f) a cleavable linker (CL); g) a constrained pseudo Fv domain comprising: i) a pseudo light variable domain comprising sdFR1-sdCDR1-sdFR2-sdCDR2-sdFR3-sdCDR3-sdFR4; ii) a constrained non-cleavable linker (CNCL); and iii) a pseudo heavy variable domain comprising vlFR1-vlCDR1-vlFR2-vlCDR2-vlFR3-vlCDR3-vlFR4; h) a third domain linker; and i) a third sdABD that binds to human serum albumin comprising sdFR1-sdCDR1-sdFR2-sdCDR2-sdFR3-sdCDR3-sdFR4; wherein the variable heavy domain and the variable light domain are capable of binding human CD3 but the constrained Fv domain does not bind CD3; the variable heavy domain and the pseudo variable light domain intramolecularly associate to form an inactive Fv; and the variable light domain and the pseudo variable heavy domain intramolecularly associate to form an inactive Fv. In some embodiments, the human tumor target antigen is B7H3.

[0486] In some embodiments of Format 2 proteins, the variable heavy domain is N-terminal to the variable light domain and the pseudo light variable domain is N-terminal to the pseudo variable heavy domain. In some embodiments, the variable heavy domain is N-terminal to the variable light domain and the pseudo variable light domain is C-terminal to the pseudo variable heavy domain. In some embodiments, the variable heavy domain is C-terminal to the variable light domain and the pseudo variable light domain is N-terminal to the pseudo variable heavy domain. In some embodiments, the variable heavy domain is C-terminal to the variable light domain and the pseudo variable light domain is C-terminal to the pseudo variable heavy domain.

[0487] In some embodiments of Format 2 proteins, the first sdABDTTA and the second sdABDTTA are the same. In some embodiments, the first sdABDTTA and the second sdABDTTA are different. In these embodiments, the sdABD-TTAs are selected from those depicted in FIG. 7, including SEQ ID NO:1, SEQ ID NO:5, SEQ ID NO:9, SEQ ID NO:13; SEQ ID NO:17; SEQ ID NO:21, SEQ ID NO:25, SEQ ID NO:29, SEQ ID NO:33, SEQ ID NO:37, SEQ ID NO:41, SEQ ID NO:45, SEQ ID NO:49, SEQ ID NO:53, SEQ ID NO:57, SEQ ID NO:61, SEQ ID NO:65, SEQ ID NO:69, SEQ ID NO:73, 77, SEQ ID NO:81, SEQ ID NO:85, SEQ ID NO:89, SEQ ID NO:93, SEQ ID NO:97, SEQ ID NO:101, SEQ ID NO:105, SEQ ID NO:109 and SEQ ID NO:113.

[0488] In some embodiments of Format 2 proteins, the pseudo heavy variable domain of the constrained pseudo Fv domain is selected from the group of SEQ ID NO:146 (V_{Hi}), SEQ ID NO:150 (V_{Hi2}) and SEQ ID NO:154 (VHiGL4), as shown in FIG. 7. In some embodiments, the pseudo light variable domain of the constrained pseudo Fv domain is selected from the group of SEQ ID NO:130 (V_{Li}), SEQ ID NO:134 (V_{Li2}) and SEQ ID NO:138 (V_{LiGL}), as shown in FIG. 7.

[0489] In a further aspect, the invention provides “Format 1” proteins comprising, from N- to C-terminal: a) a first sdABD-TTA; b) a first domain linker; c) a constrained Fv domain comprising: i) a first variable heavy domain comprising a vhCDR1, vhCDR2 and vhCDR3; ii) a constrained cleavable linker (CCL); and iii) a first variable light domain comprising vlCDR1, vlCDR2 and vlCDR3; d) a second domain linker; e) a second sdABD-TTA; f) a cleavable linker (CL); g) a constrained pseudo Fv domain comprising: i) a first pseudo light variable domain; ii) a constrained non-cleavable linker (CNCL); and iii) a first pseudo heavy variable domain; h) a third domain linker; and i) a third sdABD that binds to human serum albumin; wherein the first variable heavy domain and the first variable light domain are capable of binding human CD3 but the constrained Fv domain does not bind CD3; wherein the first variable heavy domain and the first pseudo variable light domain intramolecularly associate to form an inactive Fv; and wherein the first variable light domain and the first pseudo variable heavy domain intramolecularly associate to form an inactive Fv. In an additional aspect, the invention provides “Format 4” proteins comprising, from N- to C-terminal: a) a single domain antigen binding domain (sdABD) that binds to a human tumor target antigen (TTA) (sdABD-TTA); b) a first domain linker; c) a constrained Fv domain comprising: i) a first variable heavy domain comprising a vhCDR1, vhCDR2 and vhCDR3; ii) a constrained non-cleavable linker (CNCL); and iii) a first variable light domain comprising vlCDR1, vlCDR2 and vlCDR3; d) a cleavable linker (CL); e) a second sdABD that binds to human serum albumin; f) a domain linker; g) a constrained pseudo Fv domain comprising: i) a first pseudo light variable domain; ii) a constrained non-cleavable linker (CNCL); and iii) a first pseudo heavy variable domain; wherein the first variable heavy domain and the first variable light domain are capable of binding human CD3 but the constrained Fv domain does not bind CD3; wherein the first variable heavy domain and the first pseudo variable light domain intramolecularly associate to form an inactive Fv; and wherein the first variable light domain and the first pseudo variable heavy domain intramolecularly associate to form an inactive Fv.

[0490] In a further aspect to the Format 1, Format 2 and Format 4 proteins listed above, the first variable heavy domain is N-terminal to the first variable light domain and the pseudo light variable domain is N-terminal to the pseudo variable heavy domain.

[0491] In a further aspect to the Format 1, Format 2 and Format 4 proteins listed above, the first variable heavy domain is N-terminal to the first variable light domain and the pseudo variable heavy domain is N-terminal to the pseudo variable light domain.

[0492] In a further aspect to the Format 1, Format 2 and Format 4 proteins listed above, the first variable light domain is N-terminal to the first variable heavy domain and the pseudo light variable domain is N-terminal to the pseudo variable heavy domain.

[0493] In a further aspect to the Format 1, Format 2 and Format 4 proteins listed above, the first variable light domain is N-terminal to the first variable heavy domain and the pseudo variable heavy domain is N-terminal to the pseudo variable light domain.

[0494] In an additional aspect, the invention provides Format 1 and 2 proteins wherein the first and second TTA are the same. In a further aspect, the invention provides Format 1 and 2 proteins wherein the first and second TTA are different.

[0495] In an additional aspect, the invention provides Format 1, 2 and 4 proteins wherein the first and second TTA are selected from EGFR, EpCAM, FOLR1, Trop2, ca9 and B7H3. These sequences can be selected from the group consisting of SEQ ID NO:1, SEQ ID NO:5, SEQ ID NO:9, SEQ ID NO:13; SEQ ID NO:17; SEQ ID NO:21, SEQ ID NO:25, SEQ ID NO:29, SEQ ID NO:33, SEQ ID NO:37, SEQ ID NO:41, SEQ ID NO:45, SEQ ID NO:49, SEQ ID NO:53, SEQ ID NO:57, SEQ ID NO:61, SEQ ID NO:65, SEQ ID NO:69, SEQ ID NO:73, 77, SEQ ID NO:81, SEQ ID NO:85, SEQ ID NO:89, SEQ ID NO:93, SEQ ID NO:97, SEQ ID NO:101, SEQ ID NO:105, SEQ ID NO:109 and SEQ ID NO: 113.

[0496] In a further aspect, the invention provides Format 1, 2 and 4 proteins wherein the half-life extension domain has SEQ ID NO:117 (aHSA (10GE)) and SEQ ID NO:121 (aHSA with His tag).

[0497] In an additional aspect, the invention provides Format 1, 2 and 4 proteins wherein the cleavable linker is cleaved by a human protease selected from the group consisting of MMP2, MMP9, Meprin A, Meprin B, Cathepsin S, Cathepsin K, Cathespin L, GranzymeB, uPA, Kallekriein7, matriptase and thrombin, or others as depicted in FIG. 6.

[0498] In a further aspect, the invention provides a protein selected from the group consisting of Pro186, Pro225, Pro226, Pro233, Pro262, Pro311, Pro312, Pro313, Pro356, Pro359, Pro364, Pro388, Pro448, Pro449, Pro450, Pro451, Pro495, Pro246, Pro254, Pro255, Pro256, Pro420, Pro421, Pro432, Pro479, Pro480, Pro187, Pro221, Pro222, Pro223, Pro224, Pro393, Pro394, Pro395, Pro396, Pro429, Pro430, Pro431, Pro601, Pro602, V3 and V4, Pro664, Pro665, Pro667, Pro694, Pro695, Pro565, Pro566, Pro567, Pro727, Pro728, Pro729, Pro730, Pro731, Pro676, Pro677, Pro678, Pro679, Pro808, Pro819, Pro621, Pro622, Pro640, Pro641, Pro642, Pro643, Pro744, Pro746, Pro638, Pro639, Pro396, Pro476, Pro706, Pro709, Pro470, Pro471, Pro551, Pro552, Pro623, Pro624, Pro698, Pro655, Pro656, Pro657, Pro658, Pro516, Pro517, Pro518 and Pro519.

[0499] In an additional aspect, the invention provides nucleic acids encoding a Format 1, Format 2 or Format 4 protein as described herein, as well as expression vectors and host cells comprising the nucleic acids encoding the protein.

[0500] In a further aspect, the invention provides methods of making the proteins of the invention and methods of treating patients in need thereof.

[0501] In an additional aspect, the invention provides compositions comprising “Format 3A” pairs of pro-drug proteins, comprising: a) a first protein comprising, from N- to C-terminal: i) a first sdABD-TTA; ii) a first domain linker; iii) a pseudo Fv domain comprising, from N- to C-terminal: 1) a variable heavy chain comprising a vhCDR1, vhCDR2 and vhCDR3; 2) a cleavable linker; and 3) a first pseudo variable light domain comprising iVLCDR1, iVLCDR2 and iVLCDR3; iv) a second domain linker; v) a sdABD-HSA; a) a second protein comprising, from N- to C-terminal: i) a third sdABD that binds to a human tumor target antigen; ii) a third domain linker; iii) a pseudo Fv domain comprising, from N- to C-terminal: 1) a variable light chain comprising a VLCDR1, VLCDR2 and VLCDR3; 2) a cleavable linker; and 3) a first pseudo variable heavy domain comprising iVHCDR1, iVHCDR2 and iVHCDR3; iv) a fourth domain linker; v) a sdABD-HSA; wherein the first variable heavy domain and the first variable light domain are capable of binding human CD3 when associated; wherein the first variable heavy domain and the first pseudo variable light domain intermolecularly associate to form an inactive Fv; wherein the first variable light domain and the first pseudo variable heavy domain intermolecularly associate to form an inactive Fv; and wherein the first and third sdABD are selected from the group consisting of SEQ ID NO:1, SEQ ID NO:5, SEQ ID NO:9, SEQ ID NO:13; SEQ ID NO: 17; SEQ ID NO:21, SEQ ID NO:25, SEQ ID NO:29, SEQ ID NO:33, SEQ ID NO:37, SEQ ID NO:41, SEQ ID NO:45, SEQ ID NO:49, SEQ ID NO:53, SEQ ID NO:57, SEQ ID NO:61, SEQ ID NO:65, SEQ ID NO:69, SEQ ID NO:73, 77, SEQ ID NO:81, SEQ ID NO:85, SEQ ID NO: 89, SEQ ID NO:93, SEQ ID NO: 97, SEQ ID NO:101, SEQ ID NO:105, SEQ ID NO:109 and SEQ ID NO:113.

[0502] In a further aspect, the invention provides compositions comprising “Format 3B” pairs of pro-drug proteins, comprising a) a first protein comprising, from N- to C-terminal: i) a first sdABD-TTA; ii) a first domain linker; iii) a second sdABD-TTA; iv) a second domain linker; iii) a pseudo Fv domain comprising, from N- to C-terminal: 1) a variable heavy chain comprising a vhCDR1, vhCDR2 and vhCDR3; 2) a cleavable linker; and 3) a first pseudo variable light domain comprising iVLCDR1, iVLCDR2 and iVLCDR3; iv) a third domain linker; and v) a sdABD-HSA; a) a first second protein comprising, from N- to C-terminal: i) a third sdABD-TTA; ii) a fourth domain linker; iii) a fourth sdABD-TTA; iv) a fifth domain linker; iii) a pseudo Fv domain comprising, from N- to C-terminal: 1) a variable light chain comprising a VLCDR1, VLCDR2 and VLCDR3; 2) a cleavable linker; and 3) a first pseudo variable heavy domain comprising iVHCDR1, iVHCDR2 and iVHCDR3; iv) a sixth domain linker; v) a sdABD-HSA; wherein the first variable heavy domain and the first variable light domain are capable of binding human CD3 when associated; wherein the first variable heavy domain and the first pseudo variable light domain intermolecularly associate to form an inactive Fv; and wherein the first variable light domain and the first pseudo variable heavy domain intermolecularly associate to form an inactive Fv.

[0503] In an additional aspect, Format 3A and Format 3B proteins have sdABD-HSA that have SEQ ID NO:117 or SEQ ID NO:121. In a further aspect, Format 3A and Format 3B proteins have sdABD-TTA that binds to a TTA selected from EGFR, EpCAM, Trop2, CA9, FOLR1 and B7H3. The sdABD-TTAs can be selected from the group consisting of SEQ ID NO:1, SEQ ID NO:5, SEQ ID NO:9, SEQ ID NO:13; SEQ ID NO:17; SEQ ID NO:21, SEQ ID NO:25, SEQ ID NO:29, SEQ ID NO:33, SEQ ID NO:37, SEQ ID NO:41, SEQ ID NO:45, SEQ ID NO:49, SEQ ID NO:53, SEQ ID NO:57, SEQ ID NO:61, SEQ ID NO:65, SEQ ID NO:69, SEQ ID NO:73, 77, SEQ ID NO:81, SEQ ID NO:85, SEQ ID NO:89, SEQ ID NO:93, SEQ ID NO:97, SEQ ID NO:101, SEQ ID NO:105, SEQ ID NO:109 and SEQ ID NO:113.

[0504] In an additional aspect, the invention provides sdABDs that bind to human Trop2, having a sequence selected from SEQ ID NO:77, SEQ ID NO:81, SEQ ID NO:85, SEQ ID NO:89 and SEQ ID NO:93. In a further aspect, the invention provides sdABDs that bind to human B7H3 having a sequence selected from SEQ ID NO:41, SEQ ID NO:45, SEQ ID NO:49, SEQ ID NO:53 and SEQ ID NO:57. In an additional aspect, the invention provides sdABDs that bind to human CA9 having a sequence selected from SEQ ID NO:101, SEQ ID NO:105, SEQ ID NO:109 and SEQ ID NO:113. In a further aspect the invention provides sdABDs that bind to human EpCAM having a sequence selected from SEQ ID NO:69 and SEQ ID NO:73.

[0505] In some aspects, provided herein is a fusion protein comprising, from N- to C-terminal: (a) a first sdABD that binds a tumor target antigen (sdABD-TTA); (b) a first domain linker; (c) a constrained Fv domain comprising: (i) a first variable heavy domain comprising a vhCDR1, vhCDR2 and vhCDR3; (ii) a constrained non-cleavable linker (CNCL); and (iii) a first variable light domain comprising vlCDR1, vlCDR2 and vlCDR3; (d) a second domain linker; (e) a second sdABD-TTA; (f) a cleavable linker (CL); (g) a constrained pseudo Fv domain comprising: (i) a first pseudo light variable domain; (ii) a non-cleavable linker (NCL); and (iii) a first pseudo heavy variable domain; (h) a third domain linker; and (i) a third sdABD that binds to human serum albumin (sdABD-HSA); wherein said first variable heavy domain and said first variable light domain are capable of binding human CD3 but the constrained Fv domain does not bind CD3; the first variable heavy domain and the first pseudo variable light domain intramolecularly associate to form an inactive Fv; and the first sdABD-TTA and the second sdABD-TTA bind the same TTA selected from the group consisting of B7H3, CA9, EGFR, EpCAM, FOLR1, HER2, LyPD3, and Trop2. In some embodiments, the first and/or second sdABD-TTA can be any sdABD-TTA disclosed herein.

[0506] In some aspects, provided herein is a fusion protein comprising, from N- to C-terminal: (a) a first sdABD that binds a tumor target antigen (sdABD-TTA); (b) a first domain linker; (c) a constrained Fv domain comprising: (i) a first variable heavy domain comprising a vhCDR1, vhCDR2 and vhCDR3; (ii) a constrained non-cleavable linker (CNCL); and (iii) a first variable light domain comprising vlCDR1, vlCDR2 and vlCDR3; (d) a second domain linker; (e) a second sdABD-TTA; (f) a cleavable linker (CL); (g) a constrained pseudo Fv domain comprising: (i) a first pseudo light variable domain; (ii) a non-cleavable linker (NCL); and (iii) a first pseudo heavy variable domain; (h) a third domain linker; and (i) a third sdABD that binds to human serum albumin (sdABD-HSA); wherein said first variable heavy domain and said first variable light domain are capable of binding human CD3 but the constrained Fv domain does not bind CD3; the first variable heavy domain and the first pseudo variable light domain intramolecularly associate to form an inactive Fv; and the first sdABD-TTA bind a TTA selected from the group consisting of B7H3, CA9, EGFR, EpCAM, FOLR1, HER2, LyPD3, and Trop2 and the second sdABD-TTA bind a different TTA selected from the group consisting of B7H3, CA9, EGFR, EpCAM, FOLR1, HER2, LyPD3, and Trop2. In some embodiments, the first and/or second sdABD-TTA can be any sdABD-TTA disclosed herein.

[0507] A fusion protein comprising an amino acid sequence consisting of any one selected from the group consisting of SEQ ID NO:288 (Pro565), SEQ ID NO:289 (Pro566), SEQ ID NO:290 (Pro567), SEQ ID NO:292 (Pro727), SEQ ID NO:293 (Pro728), SEQ ID NO:294 (Pro729), SEQ ID NO:295 (Pro730), SEQ ID NO:296 (Pro731), SEQ ID NO:297 (Pro676), SEQ ID NO:298 (Pro677), SEQ ID NO:299 (Pro678), SEQ ID NO:300 (Pro679), SEQ ID NO:301 (Pro808), SEQ ID NO:302 (Pro819), SEQ ID NO:304 (Pro621), SEQ ID NO:305 (Pro622), SEQ ID NO:306 Pro640, SEQ ID NO:307 (Pro641), SEQ ID NO:308 (Pro642), SEQ ID NO:309 (Pro643), SEQ ID NO:310 (Pro744), SEQ ID NO:311 (Pro746), SEQ ID NO:312 (Pro108), SEQ ID NO:313 (Pro109), SEQ ID NO:314 (Pro396,) SEQ ID NO:315 (Pro476), SEQ ID NO:316 (Pro706), SEQ ID NO:317 (Pro709), SEQ ID NO:318 (Pro470), SEQ ID NO:319 (Pro471), SEQ ID NO:320 (Pro551), SEQ ID NO:321 (Pro552), SEQ ID NO:322 (Pro623), SEQ ID NO:323 (Pro624), SEQ ID NO:324 (Pro698), SEQ ID NO:325 (Pro655), SEQ ID NO:326 (Pro656), SEQ ID NO:327 (Pro657), SEQ ID NO:328 (Pro658), SEQ ID NO:329 (Pro516), SEQ ID NO:330 (Pro517), SEQ ID NO:331 (Pro518), SEQ ID NO:332 (Pro519), SEQ ID NO:333 (Pro513), SEQ ID NO:336 (Pro225), SEQ ID NO:338 (Pro817), SEQ ID NO:416 (Pro311), SEQ ID NO:417 (Pro312), SEQ ID NO:418 (Pro313), SEQ ID NO:419 (Pro246), SEQ ID NO:420 (Pro256), SEQ ID NO:421 (Pro420), SEQ ID NO:422 (Pro421), SEQ ID NO:487 (Pro751), SEQ ID NO:488 (Pro752), SEQ ID NO:489 (Pro824), and SEQ ID NO:490 (Pro826) SEQ ID NO:522 (Pro601), SEQ ID NO:523 (Pro602), SEQ ID NO:524 (V3), SEQ ID NO:525 (V4), SEQ ID NO:526 (Pro664), SEQ ID NO:527 (Pro665), SEQ ID NO:528 (Pro667), SEQ ID NO:529 (Pro694), SEQ ID NO:530 (Pro695), and SEQ ID NO:531 (Pro565).

[0508] In a further aspect, the invention provides nucleic acid compositions comprising first nucleic acids that encode the first protein members of the prodrug pair and second nucleic acids that encode the second protein members of the pairs, and expression vectors and host cells containing the nucleic acids.

### EXAMPLES

### Example 1: Pro Construct Construction and Purification

[0509] Transfections

[0510] Each protein (e.g. single proteins for Formats 1, 2 and 4) or pairs of constructs (Format 3) were expressed from a separate expression vector (pcdna3.4 derivative). Equal amounts of plasmid DNA that encoded the pair of hemi-cobra or single chain constructs were mixed and transfected to Expi293 cells following the manufacture's transfection protocol. Conditioned media was harvested 5 days post transfection by centrifugation (6000 rpm×25′) and filtration (0.2 uM filter). Protein expression was confirmed by SDS-PAGE. Constructs were purified and the final buffer composition was: 25 mM Citrate, 75 mM Arginine, 75 mM NaCl, 4% Sucrose, pH 7. The final preparations were stored at −80° C.

[0511] Activation of MMP9

[0512] Recombinant human (rh) MMP9 was activated according to the following protocol. Recombinant human MMP-9 (R&D #911-MP-010) is at 0.44 mg/ml (4.7 uM). p-aminophenylmercuric acetate (APMA) (Sigma) is prepared at the stock concentration of 100 mM in DMSO. Assay buffer is 50 mM Tris pH 7.5, 10 mM CaCl₂), 150 mM NaCl, 0.05% Brij-35.
[0513] Dilute rhMMP9 with assay buffer to ˜100 ug/ml (25 ul hMMP9+75 uL assay buffer)
[0514] Add p-aminophenylmercuric acetate (APMA) from 100 mM stock in DMSO to a final concentration of 1 mM (1 uL to 100 uL)
[0515] Incubate at 37′C for 24 hrs
[0516] Dilute MMP9 to 10 ng/ul (add 900 ul of assay buffer to 100 ul of activated solution)

[0517] The concentration of the activated rhMMP9 is ˜100 nM.

[0518] Cleavage of Constructs for TDCC Assays

[0519] To cleave the constructs, 100 ul of the protein sample at 1 mg/ml concentration (10.5 uM) in the formulation buffer (25 mM Citric acid, 75 mM L-arginine, 75 mM NaCl, 4% sucrose) was supplied with CaCl₂) up to 10 mM. Activated rhMMP9 was added to the concentration 20-35 nM. The sample was incubated at room temperature overnight (16-20 hrs). The completeness of cleavage was verified using SDS PAGE (10-20% TG, TG running buffer, 200 v, 1 hr). Samples were typically 98% cleaved.

### Example 2: T Cell Dependent Cellular Cytotoxicity (TDCC) Assays

[0520] Firefly Luciferase transduced HT-29 cells were grown to approximately 80% confluency and detached with Versene (0.48 mM EDTA in PBS-Ca-Mg). Cells were centrifuged and resuspended in TDCC media (5% Heat Inactivated FBS in RPMI 1640 with HEPES, GlutaMax, Sodium Pyruvate, Non-essential amino acids, and β-mercaptoethanol). Purified human Pan-T cells were thawed, centrifuged and resuspended in TDCC media.

[0521] A coculture of HT-29_Luc cells and T cells was added to 384-well cell culture plates. Serially diluted COBRAs were then added to the coculture and incubated at 37@C for 48 hours. Finally, an equal volume of SteadyGlo luciferase assay reagent was added to the plates and incubated for 20 minutes. The plates were read on the Perkin Elmer Envision with an exposure time of 0.1 s/well. Total luminescence was recorded and data were analyzed on GraphPad Prism 7 or Version 8.3.1 (depending on timing).

### Example 3: General Protocol Design of the In Vivo Adoptive T Cell Transfer Efficacy Model

[0522] These protocols were used in many of the experiments of the figures.

### Protocol 1:

[0523] Tumor cells were implanted subcutaneous (SC) in the right flank of NSG (NOD.Cg-Prkdcscid Il2rgtm1Wjl/SzJ) mice (The Jackson Laboratory, Cat. No. 005557) and allowed to grow until an established tumor with a mean volume of around 200 mm³ was reached. In parallel human T cells were cultured in T cell media (X-VIVO 15 [Lonza, Cat. No. 04-418Q], 5% Human Serum, 1% Penicillin/Streptomycin, 0.01 mM 2-Mercaptoethanol) in a G-Rex100M gas permeable flask (Wilson Wolf Cat. No. 81100S) with MACSiBeads from the T Cell Activation/Expansion Kit (Miltenyi Cat. No. 130-091-441) for around 10 days and supplemented with recombinant human IL-2 protein. Tumor growth in mice and human T cell activation/expansion were coordinated so that on Day 0 of the study mice were randomized into groups (N=6) based on tumor size; each were then injected intravenous (IV) with 2.5×10⁶ cultured human T cells and administered the first dose of the COBRA or control molecules. Mice were dosed every 3 days for 7 doses (Days 0, 3, 6, 9, 12, 15 and 18) and then followed for an additional 2-3 weeks until tumors reached >2000 mm³ in volume or the study was terminated. Tumor volumes were measured every 3 days.

[0524] Protocol 2 for Human PBMC Engraftment Model

[0525] NSG-β2M−/− mice (Jackson) were engrafted with i.v. with human PBMC; 3d post engraftment, mice were implanted with tumor cell lines subcutaneously. Once tumor growth was established, mice were randomized based on tumor volume, and test articles were dosed i.v. as indicated. Tumor volume was assessed by caliper measurement. Plasma was collected 4 h post-dose to assess cytokine levels (MesoScale Discovery) and liver enzyme elevations.

[0526] Note that the key difference between the two protocols is that human T cells are injected at the same time as the first COBRA dose, while in Protocol 2 human PBMC are put in at the same time as the tumor cells and the COBRA injections start about 10 days later.

### Example 4: In Vivo Activity with EGFR/MMP9 Hemi-COBRA Pair Pro77 and Pro53

[0527] 5×10⁶ LoVo cells or 5×10⁶ HT29 cells were implanted subcutaneous in the right flank of NSG (NOD.Cg-Prkdcscid Il2rgtm1Wjl/SzJ) mice (The Jackson Laboratory, Cat. No. 005557) and allowed to grow until tumors were established. In parallel human T cells were cultured in T cell media (X-VIVO 15 [Lonza, Cat. No. 04-418Q], 5% Human Serum, 1% Penicillin/Streptomycin, 0.01 mM 2-Mercaptoethanol) in a G-Rex100M gas permeable flask (Wilson Wolf Cat. No. 811005) with MACSiBeads from the T Cell Activation/Expansion Kit (Miltenyi Cat. No. 130-091-441) for 10 days and supplemented with recombinant human IL-2 protein. Tumor growth in mice and human T cell activation/expansion were coordinated so that on Day 0 of the study mice were randomized into groups (N=6) based on tumor size; each were then injected intravenous (IV) with 2.5×10⁶ cultured human T cells and administered the first dose of the COBRA or control molecules. Mice were dosed every 3 days for 7 doses (Days 0, 3, 6, 9, 12, 15 and 18) and then followed until tumors reach >2000 mm³ in volume or the study was terminated. Groups received 0.2 mg/kg (mpk) of the anti-EGFR×CD3 positive control Pro51 bispecific antibody (bsAb), 0.5 mpk of the negative control anti-hen egg lysozyme (HEL)×CD3 bsAb Pro98, 0.5 mpk each of the MMP9 cleavable linker containing anti-EGFR hemi-COBRA pair Pro77 and Pro53, or 0.5 mpk each of the non-cleavable (NCL) linker containing anti-EGFR hemi-COBRA pair Pro74 and Pro72. Tumor volumes were measured every 3 days.

### Example 5: In Vivo Activity with EGFR/MMP9 COBRA Pro140

[0528] 5×10⁶ LoVo cells or 5×10⁶ HT29 cells were implanted subcutaneous in the right flank of NSG (NOD.Cg-Prkdcscid Il2rgtm1Wjl/SzJ) mice (The Jackson Laboratory, Cat. No. 005557) and allowed to grow until tumors were established. In parallel human T cells are cultured in T cell media (X-VIVO 15 [Lonza, Cat. No. 04-418Q], 5% Human Serum, 1% Penicillin/Streptomycin, 0.01 mM 2-Mercaptoethanol) in a G-Rex100M gas permeable flask (Wilson Wolf Cat. No. 81100S) with MACSiBeads from the T Cell Activation/Expansion Kit (Miltenyi Cat. No. 130-091-441) for 10 days and supplemented with recombinant human IL-2 protein. Tumor growth in mice and human T cell activation/expansion were coordinated so that on Day 0 of the study mice were randomized into groups (N=6) based on tumor size; each were then injected intravenous (IV) with 2.5×10⁶ cultured human T cells and administered the first dose of the COBRA or control molecules. Mice were dosed every 3 days for 7 doses (Days 0, 3, 6, 9, 12, 15 and 18) and then followed until tumors reach >2000 mm³ in volume or the study was terminated. Groups received 0.2 mpk of the anti-EGFR×CD3 positive control Pro51 bispecific antibody (bsAb), 0.5 mpk of the negative control anti-hen egg lysozyme (HEL)×CD3 bsAb Pro98, or 0.5 mpk of the MMP9 cleavable linker containing anti-EGFR COBRA Pro140. Tumor volumes were measured every 3 days.

### Example 6: In Vivo Activity with EGFR/MMP9 COBRA Pro186

[0529] 5×10⁶ HT29 cells were implanted subcutaneous in the right flank of NSG (NOD.Cg-Prkdcscid Il2rgtm1Wjl/SzJ) mice (The Jackson Laboratory, Cat. No. 005557) and allowed to grow until tumors were established. In parallel human T cells are cultured in T cell media (X-VIVO 15 [Lonza, Cat. No. 04-418Q], 5% Human Serum, 1% Penicillin/Streptomycin, 0.01 mM 2-Mercaptoethanol) in a G-Rex100M gas permeable flask (Wilson Wolf Cat. No. 811005) with MACSiBeads from the T Cell Activation/Expansion Kit (Miltenyi Cat. No. 130-091-441) for 10 days and supplemented with recombinant human IL-2 protein. Tumor growth in mice and human T cell activation/expansion were coordinated so that on Day 0 of the study mice were randomized into groups (N=6) based on tumor size; each were then injected intravenous (IV) with 2.5×10⁶ cultured human T cells and administered the first dose of the COBRA or control molecules. Mice were dosed every 3 days for 7 doses (Days 0, 3, 6, 9, 12, 15 and 18) and then followed until tumors reach >2000 mm³ in volume or the study was terminated. Groups received 0.1 mg/kg (mpk) of the anti-EGFR×CD3 positive control Pro51 bispecific antibody (bsAb), 0.3 mpk of the of the non-cleavable (NCL) control linker containing anti-EGFR COBRA Pro214, 0.1 or 0.3 mpk of the MMP9 cleavable linker containing anti-EGFR COBRA Pro140, or 0.1 or 0.3 mpk of the MMP9 cleavable linker containing anti-EGFR COBRA Pro186. Tumor volumes were measured every 3 days.

### Example 7A: Successful Humanization of Anti-EGFR Sequences

[0530] The results are shown below.

| Molecule | KD (M) | Kon (1/Ms) | Kdis(1/s) |
|---|---|---|---|
| Pro22 (parental EGFR) | 2.58E−09M/2.6 nM | 2.05E+05 | 5.27E−04 |
| Pro90 (hEGFR1) | 2.00E−09M/2.0 nM | 2.21E+05 | 4.40E−04 |
| Pro48 (EGFR2) | 2.89E−09M/2.9 nM | 6.09E+05 | 1.76E−03 |
| Pro137 (hEGFR2) | 4.36E−09M/4.4. nM | 5.85E+05 | 2.55E−03 |
| Pro51 (hEGFR2) | 3.27E−09M/3.2 nM | 6.45E+05 | 2.11E−03 |
| Pro201 (hEGFR2 with | 2.25E−12M/2.3 pM | 1.55E+06 | 3.48E−06 |
| 2 binding sites) | | | |

[0531] These results show both that the humanization of the EGFR binding domains was successful, and that there is strong avidity to the target EGFR when two binding sites are on the molecule.

### Example 7B: Successful Humanization of EpCAM sdABDs

[0532] The results are shown below.

| | Human binding | Cyno binding | Cyno/Human |
|---|---|---|---|
| Clone | affinity (nM) | affinity (nM) | cross reactivity |
| VIB-13 | 2.3 | 11.6 | 5 |
| hVIB-13 | 2.8 | 12.7 | 4.5 |
| VIB-23 | 4.2 | 46.7 | 11.1 |
| hVIB-23 | 4.1 | 58.8 | 12.6 |

[0533] These results show both that the humanization of the EpCAM binding domains was successful.

### Example 8: COBRA™: A Novel Conditionally Active Bispecific Antibody that Regresses Established Solid Tumors in Mice—Mono-Specific and Hetero-Specific COBRAs

[0534] Despite clinical success with bispecific antibodies (bsAbs) targeting hematological malignancies (e.g. blinatumomab, a CD19×CD3 bsAb), efficacy in solid tumor indications remains a significant challenge. Because T cell redirecting bsAbs are so potent, even very low levels of cell surface target antigen expression on normal tissues may quickly become a safety liability and severely restrict the dose levels that can be achieved in patients. This limits the likelihood of reaching efficacious concentrations and reduces the therapeutic potential of these highly active molecules. Additionally, identifying “clean” target antigens that are uniquely expressed on the tumor and not on normal tissues has been very difficult at best.

[0535] To overcome these challenges, we have developed a novel recombinant bsAb platform called COBRA™ (Conditional Bispecific Redirected Activation). COBRAs are engineered to enable targeting of more widely expressed and validated tumor cell surface antigens by focusing T cell engagement within the tumor microenvironment. COBRA molecules are designed to bind to target antigen, which may be expressed on both tumor and normal cells, yet not engage T cells unless exposed to a proteolytic microenvironment, which is common in tumors but not in normal healthy tissues. Once bound to the tumor target antigen, protease-dependent linker cleavage allows COBRAs to convert an inactive anti-CD3 scFv to an active anti-CD3 scFv binding domain. Upon conversion, COBRAs are then able to simultaneously co-engage T cells and target antigen, resulting in a potent cytolytic T cell response against the tumor cells. In addition, COBRAs are designed with a half-life extension moiety that is removed from the active molecule upon proteolytic cleavage. This allows for a sustained presence in the circulation of the inactive COBRA prior to tumor target binding, and more rapid clearance of unbound active COBRA molecules, thereby decreasing the potential for cytotoxic activity in normal tissues.

[0536] Here we have revealed the novel design of the COBRA molecule and demonstrate its ability to engage CD3 and Epidermal Growth Factor Receptor (EGFR) to elicit potent cytotoxic activity in T cell culture and in human T cell implanted tumor-bearing mice. We have reported low-to-sub-picomolar T cell activation and cytotoxicity in vitro, and COBRA linker cleavage dependent T cell mediated regression of established solid tumor xenografts in NSG mice in vivo.

[0537] FIG. 11A-11C illustrate the COBRA design and the predicted folding mechanism. FIG. 11A depicts a schematic of the PRO186 COBRA. FIG. 11B shows the predicted COBRA folding. The COBRA includes inactive VH and VL paired with anti-CD3 VH and VL domains. The uncleaved PRO186 COBRA binds EGFR, has impaired CD3 binding, and binds serum albumin. FIG. 11C shows an analytical size exclusion chromatogram of PRO186. The data shows that the uncleaved PRO186 folds into a single structure.

[0538] FIG. 11A-FIG. 11D illustrates the COBRA design and the predicted folding mechanism, with the predicted structure of the uncleaved molecule on the left, which still binds tumor antigen (EGFR, in the case of the MVC-101), has impaired CD3 binding and binds human serum albumin. The middle shows the predicted cleavage products and the left shows the active dimer.

[0539] FIG. 12A-FIG. 12Q depicts additional sequences of some COBRAs of the present invention.

[0540] FIG. 13 shows that the format 2 constructs of the invention, once cleaved and dimerized, clear quickly from injected mice.

[0541] FIG. 14 shows the binding kinetics of Pro225.

[0542] FIGS. 15A and 15B shows that format 2 constructs, in this case Pro225, regresses established solid tumors in mice.

[0543] FIGS. 16A and 16B shows that the format 2 constructs of the invention, in this case Pro225, shows increased tolerability relative to inherently active T cell engagers. FIGS. 16C and 16D show that treatment with Pro225 results in lower cytokine release in mice, compared to an inherently active bispecific. Pro 225 does not induce IL2, TNFa, and IL10 in NHP and mouse IL6 in mice in comparison to inherently active T cell engagers

[0544] FIG. 17 shows the efficacy of a number of format 2 constructs of the invention in a T cell Dependent Cellular Cytotoxicity (TDCC) assay as outlined in Example 2. Pro233 is an aEGFR construct with an MMP9 cleavage site; Pro565 is an aEpCAM (h664) construct with an MMP9 cleavage site; Pro566 is an aEpCAM (h665) construct with an MMP9 cleavage site; Pro623 is a heteroCOBRA of aEGFR and aEpCAM (h664) and an MMP9 site; and Pro624 is a heteroCOBRA of aEGFR and aEpCAM (h665) and an MMP9 site.

[0545] FIG. 18 shows the efficacy of a number of format 2 constructs of the invention in a TDCC assay as outlined in Example 2. Pro233 is an αEGFR construct with an MMP9 cleavage site; Pro311 is an aFOLR1 construct with an MMP9 cleavage site; and Pro421 is a heteroCOBRA of aEGFR and aFOLR1 and an MMP9 site.

[0546] FIG. 19 shows the efficacy of a number of format 2 constructs of the invention in a TDCC assay as outlined in Example 2. Pro225 is an aB7H3 construct with an MMP9 cleavage site; Pro566 is an aEpCAM construct with an MMP9 cleavage site; Pro656 is a heteroCOBRA of aB7H3 and aEpCAM and an MMP9 site; and Pro658 is a heteroCOBRA of aEpCAM and aB7H3 and an MMP9 site.

[0547] FIG. 20 shows the efficacy of a number of format 2 constructs of the invention in a TDCC assay as outlined in Example 2 on two different cell lines. Pro225 is an aB7H3 construct with an MMP9 cleavage site; Pro566 is an aEpCAM construct with an MMP9 cleavage site; and Pro656 is a heteroCOBRA of aB7H3 and aEpCAM and an MMP9 site. HT29 is an epithelial cell line that, unlike Raji cell lines, make good xenografts in mice. HT29 expresses both target genes, (B7H3 and EpCAM), and in this case, the B7H3 expression was knocked out using CRISPR. Thus, the heteroCOBRA and the EpCAM single targeting COBRA killed both, while the B7H3 single targeting COBRA did not.

[0548] FIG. 21 shows the efficacy of a number of format 2 constructs of the invention in a TDCC assay as outlined in Example 2 on the HT29 cell line that has high EpCAM expression and low Trop2 expression. Pro824 is an aEpCAM×aTrop2 (with an MMP9 linker) heteroCOBRA. Pro825 is an aEpCAM×aTrop2 heteroCOBRA with a NCL (non-cleavable control). Pro826 is an aTrop2×aEpCAM HeteroCOBRA with an MMP9 linker. Pro827 is an aTrop2×aEpCAM HeteroCOBRA with a NCL (non-cleavable control). Pro677 is an aTrop2/MMP9 COBRA and Pro566 is an aEpCAM/MMP9 COBRA. As the levels of the two antigens vary, the heteroCOBRAs maintain good killing while the killing with the monospecific COBRAs varies. The monospecific COBRAs don't kill as well when the the expression level of their specific antigen drops (in this case Trop2); the same is true for FIGS. 22 and 23.

[0549] FIG. 22 shows the efficacy of a number of format 2 constructs of the invention in a TDCC assay as outlined in Example 2 on the HT116 cell line that has high EpCAM expression and very low Trop2 expression. Pro824 is an aEpCAM×aTrop2 (with an MMP9 linker) heteroCOBRA. Pro825 is an aEpCAM×aTrop2 heteroCOBRA with a NCL (non-cleavable control). Pro826 is an aTrop2×aEpCAM HeteroCOBRA with an MMP9 linker. Pro827 is an aTrop2×aEpCAM HeteroCOBRA with a NCL (non-cleavable control). Pro677 is an aTrop2/MMP9 COBRA and Pro566 is aEpCAM/MMP9 COBRA.

[0550] FIG. 23 shows the efficacy of a number of format 2 constructs of the invention in a TDCC assay as outlined in Example 2 on the BXPC3 cell line that has medium EpCAM expression and high Trop2 expression. Pro824 is an aEpCAM×aTrop2 (with an MMP9 linker) heteroCOBRA. Pro825 is an aEpCAM×aTrop2 heteroCOBRA with a NCL (non-cleavable control). Pro826 is an aTrop2×aEpCAM HeteroCOBRA with an MMP9 linker. Pro827 is an aTrop2×aEpCAM HeteroCOBRA with a NCL (non-cleavable control). Pro677 is an aTrop2/MMP9 COBRA and Pro566 is an aEpCAM/MMP9 COBRA.

[0551] FIG. 24 shows the in vivo efficacy of an aEpCAM COBRA with an MMP9 cleavage site using Protocol 2 of Example 3. Pro566 showed efficacy on LoVo tumors, as well as HT29, BxPC3 and SW403 tumor xenografts.

[0552] FIG. 25 shows the in vivo efficacy of an aTrop2 COBRA with an MMP9 cleavage site using Protocol 2 of Example 3. Pro677 showed efficacy on BxPC3 tumors, as well as HCC827 tumor xenografts.

[0553] FIG. 26 shows the in vivo efficacy of an aB7H3 COBRA with an MMP9 cleavage site using Protocol 3 of Example 3. Pro225 showed efficacy on A549 tumors.

[0554] Conclusions: We have designed a multivalent sdAb-diabody fusion which converts into a highly potent bispecific redirected T-cell therapeutic upon proteolytic action. In vitro assay demonstrated that protease dependent linker cleavage increased potency of T cell-mediated killing by 200-fold, thus yielding a therapeutic with sub-picomolar potency. Administration of PRO186 (Pro186) in mice with established xenografts resulted in protease cleavage dependent T cell-mediated tumor regressions in multiple tumor models. PRO186 displayed (1) extended half-life in vivo upon administration and (2) rapid clearance post proteolytic activation, thereby demonstrating PRO186 to be a therapeutic with improved safety profile over conventional T-cell redirected bispecifics.

### Example 9: Anti-HER2 Mono-Specific COBRAs Killed Tumor Cell Lines Conditionally in TDCC Experiments

[0555] Human HER2-Raji cells, cynomolgus monkey (cyno) HER2-Raji cells, SKOV3 cells (low expressing HER2 cells), Raji-paternal cells, HT29 cells (high expressing HER2 cells) were tested with various fusion proteins: Pro1123 NCL, Pro1117 MMP9, Pro 1117 MMP9cl, Pro1060 Pro51, and Pro1069 AD (FIGS. 27A-27E); Pro1110 NCL, Pro1109 MMP9, Pro 1109 MMP9cl, Pro 1062 Pro51 and Pro1071 AD (FIGS. 28A-28E); Pro1112 NCL, Pro111 MMP9, Pro 1111 MMP9cl, Pro1064 Pro51 and Pro1073 AD (FIGS. 29A-29E); Pro1124 NCL, Pro1118 MMP9, Pro 1118 MMP9cl, Pro1061 Pro51, and Pro1069 AD (FIGS. 30A-30E). The results showed that monospecific COBRAs comprising aHER2 sdABDs (aHer2 h1139, h1159, h1162, and h1156) were able to kill tumor cell lines conditionally in TDCC assays.

[0556] aHER2 fusion proteins in a Pro51 format and containing one aHER2 sdABD such as either the VIB1139 HER2 sdABD, the VIB1156 HER2 sdABD, the VIB1159 HER2 sdABD or the VIB1162 HER2 sdABD demonstrated good activity against human and cross-reactivity with cynomolgus in TDCC experiments (FIGS. 31A-31C). Additionally, aHER2 mono-specific COBRAs of Format 2 and comprising an MMP9 cleavage linker (HER2/MMP9 COBRA) were able to regress established tumor xenografts (FIG. 32), in particular, Pro1118 was administered to the mice at a dose of 100 ug/kg. FIG. 33 depicts a graph showing mouse PK data of a monospecific HER2 COBRA comprising an MMP9 cleavable linker. The results indicate that Pro1111 activity is consistent with murine HER2 binding.

[0557] The epitope binning experiments of various HER2 sdAbs were performed as understood by those skilled in the art. Competing antibodies at 100 nM were tested with saturating antibodies at 333 nM. The tested competing antibodies were: Pro1118, Pro1111, trastuzumab, and pertuzumab. The saturating tested antibodies were: the VIB1121 HER2 sdABD, the VIB1139 HER2 sdABD, the VIB1058 HER2 sdABD, the VIB1097 HER2 sdABD, trastuzumab, the VIB1156 HER2 sdABD, the VIB1160 HER2 sdABD, the VIB1159 HER2 sdABD, and the VIB1162 HER2 sdABD (FIG. 34).

[0558] The epitope binning experiments of various HER2 sdAbs were performed as recognized by those skilled in the art. Competing antibodies at 100 nM were tested with saturating antibodies at 333 nM. The tested antibodies were: Pro1118, Pro1111, trastuzumab, and pertuzumab. “B” indicates binding of competing Ab and “NB” indicates no binding of competing Ab (FIG. 35).

[0559] The amino acids locations and sequences from the epitope mapping analysis of HER2 sdAb h1156 (Pro106l) and HER2 sdAb h1162 (Pro1064) were identified using HDX (hydrogen-deuterium exchange), performed as recognized by those skilled in the art (FIG. 36).

[0560] The binding affinities of HER2 sdAbs in Pro51 format were determined. Various sdAb and fusion proteins combinations were assessed with targets from human, cynomolgus monkey and mouse. The combinations were the following: 1055 and Pro1036; 1058 and Pro1037; 1059 and Pro1038; 1091 and Pro1039; 1092 and Pro1040; 1097 and Pro1041; 1121 and Pro1042; 1139 and Pro1043; 1156 and Pro1044; 1159 and Pro1045; 1160 and Pro1046; 1162 and Pro1047; h1058 and Pro1056; h1092 and Pro1057; h1097 and Pro1058; h1121 and Pro1059; h1139 and Pro1060; h1156 and Pro1061; h1159 and Pro1062; h1160 and Pro1063; and h1162 and Pro1064 (FIG. 37).

### Example 10: Anti-CA9 Monospecific COBRAs Killed Tumor Cell Lines Conditionally in TDCC Experiments

[0561] Human CA9-Raji cells, cyno CA9-Raji cells, and HT29-parental cells were tested with various fusion proteins: Pro514 NCL, Pro518 MMP9, Pro518 MMP9cl, Pro511 Pro51, and Pro521 AD (FIGS. 38A-38C). Monospecific COBRAs targeting CA9 such as those comprising aCA9 sdABDs (aCA9 h407) were able to kill human or cyno CA9 expressing tumor cell lines conditionally.

[0562] Human CA9-Raji cells, cyno CA9-Raji cells, and HT29-parental cells were tested with various fusion proteins: Pro515 NCL, Pro519 MMP9, Pro519 MMP9cl, and Pro512 Pro51. Monospecific COBRAs targeting CA9 such as those comprising aCA9 sdABDs (aCA9 h445) were able to kill human or cyno CA9 expressing tumor cell lines conditionally (FIGS. 39A-39C).

[0563] Human CA9-Raji cells, cyno CA9-Raji cells, and HT29-parental cells were tested with various fusion proteins: Pro1095 NCL, Pro516 MMP9, Pro516 MMP9cl, and Pro509 Pro51. Monospecific COBRAs targeting CA9 such as those comprising aCA9 sdABDs (aCA9 h456) were able to kill human or cyno CA9 expressing tumor cell lines conditionally (FIGS. 40A-40C).

[0564] Human CA9-Raji cells, cyno CA9-Raji cells, and HT29-parental cells were tested with various fusion proteins: Pro513 NCL, Pro517 MMP9, Pro517 MMP9cl, Pro520 AD and Pro510 Pro51. Monospecific COBRAs targeting CA9 such as those comprising aCA9 sdABDs (aCA9 h4) were able to kill human or cyno CA9 expressing tumor cell lines conditionally (FIGS. 41A-41C).

[0565] FIG. 42 is a table depicting the binding affinities of CA9 sdAbs in a Pro51 format. Various sdAb and combination of sdAb and fusion proteins were assessed in human, cyno and mouse. The sdAbs were the following: 407, 445, 456, 472 and 476 and the combinations were the following: h445 and Pro512; h456 and Pro509; and h476 and Pro510.

[0566] CA9 monospecific COBRAs of Format 2 and comprising an MMP9 cleavage linker (CA9/MMP9 COBRA) were able to regress established tumor xenografts. FIGS. 43A-43B are a series of graphs demonstrating that CA9/MMP9 COBRAs regressed in established tumor xenograft models. Tumor SNU-16 in presence of Pro513, Pro517 and Pro518, all at a dose of 300 ug/kg. Tumor 786-0 in presence of Pro513 and Pro517, all at a dose of 100 ug/kg. FIG. 44 is a graph showing mouse PK data of CA9/MMP9 COBRA which is consistent with murine target binding for Pro516. Pro517 and Pro516 were used at dose of 100 ug/kg.

### Example 11: EGFR/EpCAM Hetero-COBRAs Induced TDCC of Cells Expressing EGFR and EpCAM

[0567] Raji-parental cells (FIG. 45A), Raji-EGFR cells (FIG. 45B), Raji-EpCAM cells (FIG. 45C), and Raji-EGFR/EpCAM cells (FIG. 45D) were tested with monospecifc COBRAs: Pro233 (EGFR/EGFR) and Pro566 (EpCAM/EpCAM) and with heteroCOBRAs Pro624 (EGFR/EpCAM) and Pro698 (EpCAM/EGFR). The results showed that hetero-specific COBRAs targeting both EGFR and EpCAM induced TDCC on Raji cells expressing one or both antigens (e.g., either EGFR alone, EpCAM alone, or both EGFR and EpCAM).

[0568] Pro624 comprises from N- to C-terminal: (sdABD-EGFR)-domain linker-aVH-CNCL-aVL-domain linker-(sdABD-EpCAM)-CL-iVL-CNCL-iVH-domain linker-(sdABD-HSA). Pro698 comprises from N- to C-terminal: (sdABD-EpCAM)-domain linker-aVH-CNCL-aVL-domain linker-(sdABD-EGFR)-CL-iVL-CNCL-iVH-domain linker-(sdABD-HSA). EGFR/EpCAM heteroCOBRAs were also able to induce TDCC on HT29 cells expressing one or both antigens.

[0569] EGFR/EpCAM heteroCOBRAs comprising an aEGFR sdABD (aEGFR hD12) and an aEpCAM sdABD (aEpCAM h644) were tested with Pro623 MMP9, Pro623 cleaved, Pro625 NCL (FIG. 46A). Pro623 comprises from N- to C-terminal: (sdABD-EGFR)-domain linker-aVH-CNCL-aVL-domain linker-(sdABD-EpCAM)-CL-iVL-CNCL-iVH-domain linker-(sdABD-HSA).

[0570] EGFR/EpCAM heteroCOBRAs comprising an aEGFR sdABD (aEGFR hD12) and an aEpCAM sdABD (aEpCAM h665) were tested with Pro698 MMP9, Pro698 cleaved, 699 NCL (FIG. 46B). Pro699 comprises from N- to C-terminal: (sdABD-EpCAM)-domain linker-aVH-CNCL-aVL-domain linker-(sdABD-EGFR)-NCL-iVL-CNCL-iVH-domain linker-(sdABD-HSA). EGFR/EpCAM heteroCOBRAs comprising an aEGFR sdABD (aEGFR hD12) and an aEpCAM sdABD (aEpCAM h665) were tested with Pro624 MMP9, Pro624 cleaved, Pro699 NCL (FIG. 46C). EGFR/EpCAM heteroCOBRAs were able to induce TDCC in various cells expressing one or both antigens.

### Example 12: EGFR/FOLR1 HeteroCOBRAs Induced TDCC of Cells Expressing EGFR and FOLR1

[0571] Raji-EGFR cells (FIG. 47A), Raji-FOLR1 cells (FIG. 47B), Raji-EGFR/FOLR1 cells (FIG. 47C) were tested with monospecifc COBRAs targeting either EGFR or FOLR1: Pro233 (EGFR/EGFR) and Pro311 (FOLR1/FOLR1) and with heteroCOBRAs targeting both EGFR and FOLR1: Pro421 (EGFR/FOLR1) and Pro420 (FOLR1/EGFR). Pro421 comprises from N- to C-terminal: (sdABD-EGFR)-domain linker-aVH-CNCL-aVL-domain linker-(sdABD-FOLR1)-CL-iVL-CNCL-iVH-domain linker-(sdABD-HSA). Pro420 comprises from N- to C-terminal: (sdABD-FOLR1)-domain linker-aVH-CNCL-aVL-domain linker-(sdABD-EGFR)-CL-iVL-CNCL-iVH-domain linker-(sdABD-HSA). The results of these experiments demonstrated that EGFR/FOLR1 heteroCOBRAs (such as Pro421) induced TDCC on Raji cells expressing one or both antigens.

[0572] FIG. 48A: H292 cells were tested with Pro214 NCL (EGFR hD12), Pro186 MMP9 (EGFR hD12), and Pro186 MMP9cl (EGFR hD12). FIG. 48B: H292 cells were tested with Pro303 NCL (FOLR1 h59-3), Pro312 MMP9 (FOLR1 h59-3), and Pro312 MMP9cl (FOLR1 h59-3). FIG. 48C: H292 cells were tested with Pro550 NCL (EGFR/FOLR1 h59-3), Pro551 MMP9 (EGFR/FOLR1 h59-3), and Pro551 MMP9cl(EGFR/FOLR1 h59-3). The results of these experiments demonstrated that aFOLR1(h59-3)/αEGFR (D12) was able to kill tumor cell lines expressing both FOLR1 and EGFR conditionally.

[0573] FIG. 49A: H292 cells were tested with Pro600 NCL EGFR/EGFR, Pro233 MMP9 EGFR/EGFR, and Pro233 MMP9cl EGFR/EGFR. FIG. 49B: H292 cells were tested with Pro299 NCL FOLR1/FOLR1, Pro311 MMP9 FOLR1/FOLR1, and Pro311 MMP9cl FOLR1/FOLR1. FIG. 49C: H292 cells were tested with Pro420 MMP9 FOLR1/EGFR, and Pro420 MMP9cl FOLR1/EGFR. FIG. 49D: H292 cells were tested with Pro421 MMP9 EGFR/FOLR1, and Pro421 MMP9cl EGFR/FOLR1. The results of these experiments demonstrated that aFOLR1 (h77-2 or h57-3)/αEGFR (hD12) were able to kill tumor cell lines expressing both FOLR1 and EGFR conditionally.

[0574] The affinities of EGFR/FOLR1 HeteroCOBRA vs Pro51 format molecules were assessed and are listed in FIG. 50.

### Example 13: Trop2/EpCAM HeteroCOBRA Induced TDCC of Cells Expressing Trop2 and EpCAM

[0575] Raji-Trop2 cells (FIG. 51A), Raji-EpCAM (FIG. 51B), SKOV3 cells (FIG. 51C), and HT29 cells (FIG. 51D) were all tested with Pro566 and Pro566cl. These experiments demonstrated that Pro566 aEpCAM (h664) was able to kill Raji cells transfected to express EpCAM and tumor cell lines expressing EpCAM conditionally.

[0576] Raji-Trop2 cells (FIG. 52A), Raji-EpCAM cells (FIG. 52B), SKOV3 cells (FIG. 52C), and HT29 cells (FIG. 52D) were all tested with Pro677 and cleaved Pro677 (Pro677cl). These experiments demonstrated that Pro677 (aTrop2 h557) was able to kill Raji cells transfected to express Trop2 and tumor cell lines expressing Trop2 conditionally.

[0577] Raji-Trop2 cells (FIG. 53A), Raji-EpCAM cells (FIG. 53B), SKOV3 cells (FIG. 53C), and HT29 cells (FIG. 53D) were all tested with Pro824 and cleaved Pro824 (Pro824cl). These experiments demonstrated that Pro824 (aEpCAM h664/aTrop2 h557) was able to kill Raji transfected to express either EpCAM or Trop2 and tumor cell lines expressing both EpCAM and Trop2 conditionally.

[0578] Raji-Trop2 cells (FIG. 54A), Raji-EpCAM cells (FIG. 54B), SKOV3 cells (FIG. 54C), and HT29 cells (FIG. 54D) were all tested with Pro826 and cleaved Pro826 (Pro826cl). These experiments demonstrated that Pro826 (aTROP2 h557/aEpCAM h664) was able kill to Raji transfected to express either Trop2 or EpCAM and tumor cell lines expressing both Trop2 and EpCAM conditionally.

[0579] FIG. 55A: BXPC3 cells (human pancreatic cancer cell line) were tested with Pro569, Pro566 and Pro566cl. FIG. 55B: BXPC3 cells were tested with Pro681, Pro677 and Pro677cl. FIG. 55C: BXPC3 cells were tested with Pro825, Pro824 and Pro824cl. FIG. 55D: BXPC3 cells were tested with Pro827, Pro826 and Pro826cl. These experiments demonstrated that EpCAM monospecific COBRAs, Trop2 monospecific COBRAs and Trop2/EpCAM heterospecific COBRAs all worked well to conditionally kill BXPC3 cells.

[0580] FIG. 56A: HCT116 cells (human colon cancer cell line) were tested with Pro569, Pro566 and Pro566cl. FIG. 56B: HCT116 cells were tested with Pro681 NCL, Pro677 MMP9, and Pro677MMP9cl. FIG. 56C: HCT116 cells were tested with Pro825, Pro824 and Pro824cl. FIG. 56D: HCT116 cells were tested with Pro827, Pro826 and Pro826cl. These experiments demonstrated that EpCAM monospecific COBRAs, Trop2 monospecific COBRAs and Trop2/EpCAM heterospecific COBRAs all worked well to conditionally kill HCT116 cells.

[0581] FIG. 57A: SCC25 cells (human squamous cell carcinoma cell line) were tested with Pro569, Pro566 and Pro566cl. FIG. 57B: SCC25 cells were tested with Pro681, Pro677 and Pro677cl. FIG. 57C: SCC25 cells were tested with Pro825, Pro824 and Pro824cl. FIG. 57D: SCC25 cells were tested with Pro827, Pro826 and Pro826cl. These experiments demonstrated that EpCAM monospecific COBRAs, Trop2 monospecific COBRAs and Trop2/EpCAM heterospecific COBRAs all worked well to conditionally kill SCC25 cells.

### Example 14: B7H3/EpCAM HeteroCOBRAs Induced TDCC of Cells Expressing B7H3 and EpCAM

[0582] B7H3/EpCAM heteroCOBRAs were shown to induce TDCC on cells expressing one or both antigens. Raji-parental cells (FIG. 58A), Raji-B7H3 cells (FIG. 58B), Raji-EpCAM cells (FIG. 58C), and Raji-B7H3/EpCAM cells (FIG. 58D) were tested with monospecifc COBRAs: Pro225 (B7H3/B7H3 and Pro566 (EpCAM/EpCAM) and with heteroCOBRAs Pro656 (B7H3/EGFR) and Pro658 (EpCAM/B7H3).

[0583] Experiments were performed in CRISPR knockout lines: HT29 cells (FIG. 59A), HT29-B7H3 KO cells (FIG. 59B), HT29-EpCAM KO cells (FIG. 59C), and HT29-B7H3/EpCAM KO cells (FIG. 59D) were all tested with monospecific COBRAs (Pro225 BN7H3/B7H3 and Pro566 EpCAM/EpCAM) and with heteroCOBRAS (Pro656 B7H3/EpCAM). All COBRAs were pre-cleaved.

[0584] FIG. 60A: IGROV cells were tested with Pro295 NCL (B7H3 hF7), Pro225 MMP9 (B7H3 hF7) and Pro225 MMP9cl (B7H3 hF7). FIG. 60B: IGROV cells were tested with Pro568 NCL (EpCAM h664), Pro565 MMP9 (EpCAM h664), and Pro565 MMP9cl (EpCAM h664). FIG. 60C: IGROV cells were tested with Pro659 NCL (B7H3 hF7/EpCAM h664), Pro655 MMP9 (B7H3 hF7/EpCAM h664) and Pro655 MMP9cl (B7H3 hF7/EpCAM h664). FIG. 60D: IGROV cells were tested with Pro661 NCL (EpCAM h664/B7H3 hF7), Pro657 MMP9 (EpCAM h664/B7H3 hF7) Pro657 MMP9cl (EpCAM h664/B7H3 hF7). The results showed that aEpCAM (aEpCAM h664)/aB7H3 (aB7H3 hF7) heteroCOBRAs were able to kill tumor cell lines expressing both EpCAM and B7H3 conditionally.

[0585] FIG. 61A: IGROV cells were tested with Pro295 NCL (B7H3 hF7), Pro225 MMP9 (B7H3 hF7) and Pro225 MMP9cl (B7H3 hF7). FIG. 61B: IGROV cells were tested with Pro569 NCL (EpCAM h665), Pro566 MMP9 (EpCAM h665), and Pro566 MMP9cl (EpCAM h665). FIG. 61C: IGROV cells were tested with Pro660 NCL (B7H3/EpCAM h665), Pro656 MMP9 (B7H3/EpCAM h665) and Pro656 MMP9cl (B7H3/EpCAM h665). FIG. 61D: IGROV cells were tested with Pro662 NCL (EpCAM h665/B7H3), Pro658 MMP9 (EpCAM h665/B7H3) and Pro658 (EpCAM h665/B7H3). The results showed that aEpCAM (aEPCAM h665)/aB7H3 (aB7H3 hF7) was able to kill tumor cell lines expressing both EpCAM and B7H3 conditionally.

[0586] FIG. 62A: H292 cells were tested with Pro295 NCL (B7H3 hF7), Pro225 MMP9 (B7H3 hF7) and Pro225 MMP9cl (B7H3 hF7). FIG. 62B: H292 cells were tested with Pro568 NCL (EpCAM h664), Pro565 MMP9 (EpCAM h664), and Pro565 MMP9cl (EpCAM h664). FIG. 62C: H292 cells were tested with Pro659 NCL (B7H3/EpCAM h664), Pro655 MMP9 (B7H3/EpCAM h664) and Pro655 MMP9cl (B7H3/EpCAM h664). FIG. 62D: H292 cells were tested with Pro661 NCL (EpCAM h664/B7H3), Pro657 MMP9 (EpCAM h664/B7H3) and Pro657 MMP9cl (EpCAM h664/B7H3). The results showed that aEpCAM (aEpCAM h664)/aB7H3 (aB7H3 hF7) heteroCOBRAs were able to kill tumor cell lines expressing both EpCAM and B7H3 conditionally.

[0587] H292 cells were tested with Pro295 NCL (B7H3 hF7), Pro225 MMP9 (B7H3 hF7) and Pro225 MMP9cl (B7H3 hF7) (FIG. 63A); Pro569 NCL (EpCAM h665), Pro566 MMP9 (EpCAM h665), and Pro566 MMP9cl (EpCAM h665) (FIG. 63B); Pro660 NCL (B7H3/EpCAM h665), Pro656 MMP9 (B7H3/EpCAM h665) and Pro656 MMP9cl (B7H3/EpCAM h665) (FIG. 63C); and Pro662 NCL (EpCAM h665/B7H3), Pro658 MMP9 (EpCAM h665/B7H3) and Pro658 MMP9cl (EpCAM h665/B7H3) (FIG. 63D). The results showed that aEpCAM (aEPCAM h665)/aB7H3 (aB7H3 hF7) heteroCOBRAs were able to kill tumor cell lines expressing both EpCAM and B7H3 conditionally.

[0588] HT29 cells (FIG. 64A), U87-MG (EpCAM-negative) cells (FIG. 64B), Capan2 cells (FIG. 64C), and VCAP cells (FIG. 64D) were all tested with monospecific COBRAs: Pro225 (B7H3/B7H3 and Pro566 (EpCAM/EpCAM) and with heteroCOBRAS Pro656 (B7H3/EpCAM and Pro658 EpCAM/B7H3) to show the effect of TDCC on tumor cell lines.

[0589] T cell activation in the presence of HT29 cells was determined using standard Jurkat luciferase assays known to those skilled in the art. The HT29 cells were tested with monospecific COBRAs: Pro225 (B7H3/B7H3) and Pro566(EpCAM/EpCAM) and with heteroCOBRAs: Pro656 (B7H3/EpCAM) and Pro658 (EpCAM/B7H3) (FIG. 65).

[0590] The activity of heteroCOBRAs in the Jurkat activation assay were shown to be less sensitive to inhibition by soluble antigen than with monospecific COBRAs on HT29 cells. The cells were assayed with soluble EpCAM, soluble B7H3-4Ig and with no antigen (control) together with monospecific COBRAs: Pro225 (B7H3/B7H3) (FIG. 66A) and Pro566 (EpCAM/EpCAM) (FIG. 66B) and with heteroCOBRAs: Pro656 B7H3/EpCAM (FIG. 66C) and Pro658 EpCAM/B7H3 (FIG. 66D). Pre-cleaved COBRAs were added at the EC₉₀ for each COBRA in the presence of varying concentrations of soluble antigen. A stronger inhibition of Jurkat activation was detected with the monospecific COBRAs.

[0591] Antigens huB7H3-4Ig, huEpCAM and huB7H3-4Ig with huEpCAM were assayed with heteroCOBRAs: Pro656 B7H3/EpCAM and Pro658 EpCAM/B7H3 and FIG. 67 provides the list of the affinities of B7H3/EpCAM heteroCOBRAs.

[0592] The pharmacokinetics of B7H3/EpCAM heteroCOBRAs (FIG. 68) showed that the EpCAM sdAb did not bind mouse B7H3. Pro566 which includes two EpCAM sdAbs (Pro 566 EpCAM/EpCAM) exhibited the highest circulating concentration. The B7H3 sdAb bound to mouse B7H3 proteins and Pro225 which includes two B7H3 sdAbs, (Pro225 B7H3/B7H3) exhibited the lowest exposure in circulation due to tissue-mediated drug disposition. The heteroCOBRAs, which have one B7H3 sdAB and one EpCAM sdAb (Pro656 B7H3/EpCAM and Pro658 EpCAM/B7H3) exhibited exposures between two parental monospecific COBRAs.

[0593] In vivo activity of the heteroCOBRAs were determined in the HT29 cell line xenograft model in mice. HeteroCOBRAs were administered at the following dosages: Pro660 NCL (B7H3/EpCAM; 0.3 mg/kg), Pro656 MMP9 (B7H3/EpCAM; 0.01 mg/kg), Pro656 MMP9 (B7H3/EpCAM; 0.03 mg/kg) and Pro656 MMP9 (B7H3/EpCAM; 0.1 mg/kg). The B7H3/EpCAM heteroCOBRAs were active in mice (FIG. 69).

[0594] Additional heteroCOBRAs were tested in the HT29 cell line xenograft model and administered at the following dosages: Pro662 NCL (EpCAM/B7H3; 0.1 mg/kg) and Pro658 MMP9 (EpCAM/B7H3; 0.1 mg/kg). The B7H3/EpCAM heteroCOBRAs were active in mice (FIG. 70).

What is claimed is:

1. A fusion protein comprising, from N- to C-terminal:
a) a first sdABD that binds HER2 (sdABD-HER2);
b) a first domain linker;
c) a constrained Fv domain comprising:
i) a first variable heavy domain comprising a vhCDR1, vhCDR2 and vhCDR3;
ii) a constrained non-cleavable linker (CNCL); and
iii) a first variable light domain comprising vlCDR1, vlCDR2 and vlCDR3;
d) a second domain linker;
e) a second sdABD-HER2;
f) a cleavable linker (CL);
g) a constrained pseudo Fv domain comprising:
i) a first pseudo variable light domain;
ii) a non-cleavable linker (NCL); and
iii) a first pseudo variable heavy domain;
h) a third domain linker; and
i) a third sdABD that binds to human serum albumin (sdABD-HSA);
wherein the first variable heavy domain and the first variable light domain of the constrained Fv domain are capable of binding human CD3 but the constrained pseudo Fv domain does not bind CD3;
the first variable heavy domain and the first pseudo variable light domain intramolecularly associate to form an inactive Fv; and
the first variable light domain and the first pseudo variable heavy domain intramolecularly associate to form an inactive Fv.

2. The fusion protein of claim 1 wherein the first and/or second sdABD-HER2 has an amino acid sequence comprising a set of CDRs selected from the group consisting of:
a) a sdCDR1 of SEQ ID NO:194 a sdCDR2 of SEQ ID NO:195 and a sdCDR3 of SEQ ID NO:196;
b) a sdCDR1 of SEQ ID NO:218, a sdCDR2 of SEQ ID NO:219 and a sdCDR3 of SEQ ID NO:220;
c) a sdCDR1 of SEQ ID NO:226, a sdCDR2 of SEQ ID NO:227 and a sdCDR3 of SEQ ID NO:228;
d) a sdCDR1 of SEQ ID NO:238, a sdCDR2 of SEQ ID NO:239 and a sdCDR3 of SEQ ID NO:240;
e) a sdCDR1 of SEQ ID NO:142, a sdCDR2 of SEQ ID NO:143 and a sdCDR3 of SEQ ID NO:144;
f) a sdCDR1 of SEQ ID NO146, a sdCDR2 of SEQ ID NO:147 and a sdCDR3 of SEQ ID NO:148;
g) a sdCDR1 of SEQ ID NO:150, a sdCDR2 of SEQ ID NO:151 and a sdCDR3 of SEQ ID NO:152;
h) a sdCDR1 of SEQ ID NO:154, a sdCDR2 of SEQ ID NO:155, and a sdCDR3 of SEQ ID NO:156;
i) a sdCDR1 of SEQ ID NO:158, a sdCDR2 of SEQ ID NO:159, and a sdCDR3 of SEQ ID NO:160;
j) a sdCDR1 of SEQ ID NO:162, a sdCDR2 of SEQ ID NO:163, and a sdCDR3 of SEQ ID NO:164;
k) a sdCDR1 of SEQ ID NO:166, a sdCDR2 of SEQ ID NO:167, and a sdCDR3 of SEQ ID NO:168;
l) a sdCDR1 of SEQ ID NO:170, a sdCDR2 of SEQ ID NO:171, and a sdCDR3 of SEQ ID NO:172;
m) a sdCDR1 of SEQ ID NO:174, a sdCDR2 of SEQ ID NO:175, and a sdCDR3 of SEQ ID NO:176;
n) a sdCDR1 of SEQ ID NO:178, a sdCDR2 of SEQ ID NO:179, and a sdCDR3 of SEQ ID NO:180;
o) a sdCDR1 of SEQ ID NO:182, a sdCDR2 of SEQ ID NO:183, and a sdCDR3 of SEQ ID NO:184;
p) a sdCDR1 of SEQ ID NO:186, a sdCDR2 of SEQ ID NO:187, and a sdCDR3 of SEQ ID NO:188;
q) a sdCDR1 of SEQ ID NO:190, a sdCDR2 of SEQ ID NO:191, and a sdCDR3 of SEQ ID NO:192;
r) a sdCDR1 of SEQ ID NO:194, a sdCDR2 of SEQ ID NO:195, and a sdCDR3 of SEQ ID NO:196;
s) a sdCDR1 of SEQ ID NO:198, a sdCDR2 of SEQ ID NO:199, and a sdCDR3 of SEQ ID NO:200;
t) a sdCDR1 of SEQ ID NO:202, a sdCDR2 of SEQ ID NO:203, and a sdCDR3 of SEQ ID NO:204;
u) a sdCDR1 of SEQ ID NO:206, a sdCDR2 of SEQ ID NO:207, and a sdCDR3 of SEQ ID NO:203;
v) a sdCDR1 of SEQ ID NO:210, a sdCDR2 of SEQ ID NO:211, and a sdCDR3 of SEQ ID NO:212;
w) a sdCDR1 of SEQ ID NO:214, a sdCDR2 of SEQ ID NO:215, and a sdCDR3 of SEQ ID NO:216;
x) a sdCDR1 of SEQ ID NO:218, a sdCDR2 of SEQ ID NO:219, and a sdCDR3 of SEQ ID NO:220;
y) a sdCDR1 of SEQ ID NO:222, a sdCDR2 of SEQ ID NO:223, and a sdCDR3 of SEQ ID NO:224;
z) a sdCDR1 of SEQ ID NO:226, a sdCDR2 of SEQ ID NO:227, and a sdCDR3 of SEQ ID NO:228;
aa) a sdCDR1 of SEQ ID NO:230, a sdCDR2 of SEQ ID NO:231, and a sdCDR3 of SEQ ID NO:232;
ab) a sdCDR1 of SEQ ID NO:234, a sdCDR2 of SEQ ID NO:235, and a sdCDR3 of SEQ ID NO:236;
ac) a sdCDR1 of SEQ ID NO:238, a sdCDR2 of SEQ ID NO:239, and a sdCDR3 of SEQ ID NO:240;
ad) a sdCDR1 of SEQ ID NO:242, a sdCDR2 of SEQ ID NO:243, and a sdCDR3 with SEQ ID NO:244; and
ae) a sdCDR1 of SEQ ID NO:500, a sdCDR2 of SEQ ID NO:501, and a sdCDR3 with SEQ ID NO:502;
af) a sdCDR1 of SEQ ID NO:504, a sdCDR2 of SEQ ID NO:505, and a sdCDR3 with SEQ ID NO:506;
ag) a sdCDR1 of SEQ ID NO:508, a sdCDR2 of SEQ ID NO:509, and a sdCDR3 with SEQ ID NO:510; and
ah) a sdCDR1 of SEQ ID NO:512, a sdCDR2 of SEQ ID NO:513, and a sdCDR3 with SEQ ID NO:5.

3. The fusion protein of claim 1, wherein the first and/or second sdABD-HER2 comprises an amino acid sequence selected from the group consisting of SEQ ID NO:193, SEQ ID NO:217, SEQ ID NO:225, SEQ ID NO:237, SEQ ID NO:141, SEQ ID NO:145, SEQ ID NO:149, SEQ ID NO:153, SEQ ID NO:157, SEQ ID NO:161, SEQ ID NO:165, SEQ ID NO:169, SEQ ID NO:173, SEQ ID NO:177, SEQ ID NO:181, SEQ ID NO:185, SEQ ID NO:189, SEQ ID NO:197, SEQ ID NO:201, SEQ ID NO:205, SEQ ID NO:209, SEQ ID NO:213, SEQ ID NO:221, SEQ ID NO:229, SEQ ID NO:233, SEQ ID NO:241, SEQ ID NO:499, SEQ ID NO:503, SEQ ID NO:507, and SEQ ID NO: 511.

4. The fusion protein of any one of claims 1-3, wherein the first sdABD-HER2 and the second sdABD-HER2 are the same.

5. The fusion protein of claim 1 or 3, wherein the first sdABD-HER2 and the second sdABD-HER2 are different.

6. The fusion protein of any one of claims 1-5, wherein the first variable heavy domain is N-terminal to the first variable light domain and the pseudo variable light domain is N-terminal to the pseudo variable heavy domain.

7. The fusion protein of any one of claims 1-5, wherein the first variable heavy domain is N-terminal to the first variable light domain and the pseudo variable heavy domain is N-terminal to the pseudo variable light domain.

8. The fusion protein of any one of claims 1-5, wherein the first variable light domain is N-terminal to the first variable heavy domain and the pseudo variable light domain is N-terminal to the pseudo variable heavy domain.

9. The fusion protein according to any of claims 1-5 wherein the first variable light domain is N-terminal to the first variable heavy domain and the pseudo variable heavy domain is N-terminal to the pseudo variable light domain.

10. The fusion protein of any one of claims 1-9, wherein the third sdABD that binds to HSA (sdABD-HSA) has an amino acid sequence comprising:
(a) a set of CDRs selected from the group consisting of (i) a sdCDR1 of SEQ ID NO:246, a sdCDR2 of SEQ ID NO:247, and a sdCDR3 of SEQ ID NO:248, and (ii) a sdCDR1 of SEQ ID NO:250, a sdCDR2 of SEQ ID NO:251, and a sdCDR3 of SEQ ID NO:252; or
(b) an amino acid sequence selected from the group consisting of SEQ ID NO:245 and SEQ ID NO:249.

11. The fusion protein of any one of claims 1-10, wherein the cleavable linker comprises a cleavage domain sequence selected from the group consisting of SEQ ID NOS:339-408 and 532-535.

12. The fusion protein of any one of claims 1-11, wherein the cleavable linker is cleaved by a human protease selected from the group consisting of MMP2, MMP9, meprin A, meprin B, cathepsin S, capthepsin K, capthesin L, granzyme B, uPA, kallekriein7, matriptase, and thrombin.

13. The fusion protein of any one of claims 1-12, wherein the fusion protein has an amino acid sequence selected from group consisting of SEQ ID NOS:459-484 and 491-494.

14. A nucleic acid encoding a fusion protein of any one of claims 1-13.

15. An expression vector comprising the nucleic acid of claim 14.

16. A host cell comprising the expression vector of claim 15.

17. A method of making a fusion protein comprising: (i) culturing the host cell of claim 16 under conditions wherein the fusion protein is expressed and (ii) recovering the fusion protein.

18. A method of treating cancer in a subject comprising administering the fusion protein of any one of claims 1-13 to the subject.

19. A single domain antigen binding domain (sdABD) that binds human HER2 (sdABD-HER2) comprising
(i) an amino acid sequence selected from the group consisting of SEQ ID NO:141, SEQ ID NO:145, SEQ ID NO:149, SEQ ID NO:153, SEQ ID NO:157, SEQ ID NO:161, SEQ ID NO:165, SEQ ID NO:169, SEQ ID NO:173, SEQ ID NO:177, SEQ ID NO:181, SEQ ID NO:185, SEQ ID NO:189, SEQ ID NO:193, SEQ ID NO:197, SEQ ID NO:201, SEQ ID NO:205, SEQ ID NO:209, SEQ ID NO:213, SEQ ID NO:217, SEQ ID NO:221, SEQ ID NO:225, SEQ ID NO:229, SEQ ID NO:233, SEQ ID NO:237, SEQ ID NO:241, SEQ ID NO:499, SEQ ID NO:503, SEQ ID NO:507, and SEQ ID NO:511; or
(ii) an amino acid sequence comprising a set of CDRs selected from the group consisting of:
a) a sdCDR1 of SEQ ID NO:194 a sdCDR2 of SEQ ID NO:195 and a sdCDR3 of SEQ ID NO:196;
b) a sdCDR1 of SEQ ID NO:218, a sdCDR2 of SEQ ID NO:219 and a sdCDR3 of SEQ ID NO:220;
c) a sdCDR1 of SEQ ID NO:226, a sdCDR2 of SEQ ID NO:227 and a sdCDR3 of SEQ ID NO:228;
d) a sdCDR1 of SEQ ID NO:238, a sdCDR2 of SEQ ID NO:239 and a sdCDR3 of SEQ ID NO:240;
e) a sdCDR1 of SEQ ID NO:142, a sdCDR2 of SEQ ID NO:143 and a sdCDR3 of SEQ ID NO:144;
f) a sdCDR1 of SEQ ID NO146, a sdCDR2 of SEQ ID NO:147 and a sdCDR3 of SEQ ID NO:148;
g) a sdCDR1 of SEQ ID NO:150, a sdCDR2 of SEQ ID NO:151 and a sdCDR3 of SEQ ID NO:152;
h) a sdCDR1 of SEQ ID NO:154, a sdCDR2 of SEQ ID NO:155, and a sdCDR3 of SEQ ID NO:156;
i) a sdCDR1 of SEQ ID NO:158, a sdCDR2 of SEQ ID NO:159, and a sdCDR3 of SEQ ID NO:160;
j) a sdCDR1 of SEQ ID NO:162, a sdCDR2 of SEQ ID NO:163, and a sdCDR3 of SEQ ID NO:164;
k) a sdCDR1 of SEQ ID NO:166, a sdCDR2 of SEQ ID NO:167, and a sdCDR3 of SEQ ID NO:168;
l) a sdCDR1 of SEQ ID NO:170, a sdCDR2 of SEQ ID NO:171, and a sdCDR3 of SEQ ID NO:172;
m) a sdCDR1 of SEQ ID NO:174, a sdCDR2 of SEQ ID NO:175, and a sdCDR3 of SEQ ID NO:176;
n) a sdCDR1 of SEQ ID NO:178, a sdCDR2 of SEQ ID NO:179, and a sdCDR3 of SEQ ID NO:180;
o) a sdCDR1 of SEQ ID NO:182, a sdCDR2 of SEQ ID NO:183, and a sdCDR3 of SEQ ID NO:184;
p) a sdCDR1 of SEQ ID NO:186, a sdCDR2 of SEQ ID NO:187, and a sdCDR3 of SEQ ID NO:188;
q) a sdCDR1 of SEQ ID NO:190, a sdCDR2 of SEQ ID NO:191, and a sdCDR3 of SEQ ID NO:192;
r) a sdCDR1 of SEQ ID NO:194, a sdCDR2 of SEQ ID NO:195, and a sdCDR3 of SEQ ID NO:196;
s) a sdCDR1 of SEQ ID NO:198, a sdCDR2 of SEQ ID NO:199, and a sdCDR3 of SEQ ID NO:200;
t) a sdCDR1 of SEQ ID NO:202, a sdCDR2 of SEQ ID NO:203, and a sdCDR3 of SEQ ID NO:204;
u) a sdCDR1 of SEQ ID NO:206, a sdCDR2 of SEQ ID NO:207, and a sdCDR3 of SEQ ID NO:203;
v) a sdCDR1 of SEQ ID NO:210, a sdCDR2 of SEQ ID NO:211, and a sdCDR3 of SEQ ID NO:212;
w) a sdCDR1 of SEQ ID NO:214, a sdCDR2 of SEQ ID NO:215, and a sdCDR3 of SEQ ID NO:216;
x) a sdCDR1 of SEQ ID NO:218, a sdCDR2 of SEQ ID NO:219, and a sdCDR3 of SEQ ID NO:220;
y) a sdCDR1 of SEQ ID NO:222, a sdCDR2 of SEQ ID NO:223, and a sdCDR3 of SEQ ID NO:224;
z) a sdCDR1 of SEQ ID NO:226, a sdCDR2 of SEQ ID NO:227, and a sdCDR3 of SEQ ID NO:228;
aa) a sdCDR1 of SEQ ID NO:230, a sdCDR2 of SEQ ID NO:231, and a sdCDR3 of SEQ ID NO:232;
ab) a sdCDR1 of SEQ ID NO:234, a sdCDR2 of SEQ ID NO:235, and a sdCDR3 of SEQ ID NO:236;
ac) a sdCDR1 of SEQ ID NO:238, a sdCDR2 of SEQ ID NO:239, and a sdCDR3 of SEQ ID NO:240;
ad) a sdCDR1 of SEQ ID NO:242, a sdCDR2 of SEQ ID NO:243, and a sdCDR3 with SEQ ID NO:244;
ae) a sdCDR1 of SEQ ID NO:500, a sdCDR2 of SEQ ID NO:501, and a sdCDR3 with SEQ ID NO:502;
af) a sdCDR1 of SEQ ID NO:504, a sdCDR2 of SEQ ID NO:505, and a sdCDR3 with SEQ ID NO:506;
ag) a sdCDR1 of SEQ ID NO:508, a sdCDR2 of SEQ ID NO:509, and a sdCDR3 with SEQ ID NO:510; and
ah) a sdCDR1 of SEQ ID NO:512, a sdCDR2 of SEQ ID NO:513, and a sdCDR3 with SEQ ID NO:514.

20. A fusion protein comprising, from N- to C-terminal:
a) a first sdABD that binds a tumor target antigen (sdABD-TTA);
b) a first domain linker;
c) a constrained Fv domain comprising:
i) a first variable heavy domain comprising a vhCDR1, vhCDR2 and vhCDR3;
ii) a constrained non-cleavable linker (CNCL); and
iii) a first variable light domain comprising vlCDR1, vlCDR2 and vlCDR3;
d) a second domain linker;
e) a second sdABD-TTA;
f) a cleavable linker (CL);
g) a constrained pseudo Fv domain comprising:
i) a first pseudo variable light domain;
ii) a non-cleavable linker (NCL); and
iii) a first pseudo variable heavy domain;
h) a third domain linker; and
i) a third sdABD that binds to human serum albumin (sdABD-HSA);
wherein the first variable heavy domain and the first variable light domain of the constrained Fv domain are capable of binding human CD3 but the constrained pseudo Fv domain does not bind CD3; the first variable heavy domain and the first pseudo variable light domain intramolecularly associate to form an inactive Fv; the first variable light domain and the first pseudo variable heavy domain intramolecularly associate to form an inactive Fv and
wherein either (1) the first sdABD-TTA is a sdABD-HER2 or a sdABD-LyPD3, and the second sdABD-TTA is selected from the group consisting of a sdABD-B7H3, a sdABD-CA9, a sdABD-EGFR, a sdABD-EpCAM, a sdABD-FOLR1, a sdABD-HER2, a sdABD-LyPD3 and a sdABD-Trop2; or (2) the first sdABD-TTA is selected from the group consisting of a sdABD-B7H3, a sdABD-CA9, a sdABD-EGFR, a sdABD-EpCAM, a sdABD-FOLR1, a sdABD-HER2, a sdABD-LyPD3 and a sdABD-Trop2, and the second sdABD-TTA is a sdABD-HER2 or a sdABD-LyPD3.

21. The fusion protein of claim 20, wherein the first and second sdABD-TTA are each a sdABD-LyPD3.

22. The fusion protein of claim 21, wherein the first and second sdABD-LPYD3 are the same.

23. The fusion protein of claim 21, wherein the first and second sdABD-LPYD3 are different.

24. The fusion protein of claim 20, wherein
(a) the first sdABD-TTA is a sdABD-HER2 and the second sdABD-TTA is selected from the group consisting of a sdABD-B7H3, a sdABD-CA9, a sdABD-EGFR, a sdABD-EpCAM, a sdABD-FOLR1, a sdABD-LyPD3, and a sdABD-Trop2;
(b) the first sdABD-TTA is a sdABD-LyPD3 and the second sdABD-TTA is selected from the group consisting a sdABD-B7H3, a sdABD-CA9, a sdABD-EGFR, a sdABD-EpCAM, a sdABD-FOLR1, a sdABD-HER2, and a sdABD-Trop2;
(c) the first sdABD-TTA is selected from the group consisting a sdABD-B7H3, a sdABD-CA9, a sdABD-EGFR, a sdABD-EpCAM, a sdABD-FOLR1, a sdABD-LyPD3, and a sdABD-Trop2 and the second TTA is a sdABD-HER2; or
(d) the first sdABD-TTA is selected from the group consisting a sdABD-B7H3, a sdABD-CA9, a sdABD-EGFR, a sdABD-EpCAM, a sdABD-FOLR1, a sdABD-LyPD3, and a sdABD-Trop2 and the second TTA is a sdABD-LyPD3.

25. The fusion protein of claim 20 or 24, wherein the sdABD-HER2 comprises an amino acid sequence selected from the group consisting of:
(a) a set of CDRs comprising a sdCDR1 of SEQ ID NO:194 a sdCDR2 of SEQ ID NO:195 and a sdCDR3 of SEQ ID NO:196;
(b) a set of CDRs comprising a sdCDR1 of SEQ ID NO:218, a sdCDR2 of SEQ ID NO:219 and a sdCDR3 of SEQ ID NO:220;
(c) a set of CDRs comprising a sdCDR1 of SEQ ID NO:226, a sdCDR2 of SEQ ID NO:227 and a sdCDR3 of SEQ ID NO:228;
(d) a set of CDRs comprising a sdCDR1 of SEQ ID NO:238, a sdCDR2 of SEQ ID NO:239 and a sdCDR3 of SEQ ID NO:240;
(e) a set of CDRs comprising a sdCDR1 of SEQ ID NO:142, a sdCDR2 of SEQ ID NO:143 and a sdCDR3 of SEQ ID NO:144;
(f) a set of CDRs comprising a sdCDR1 of SEQ ID NO:146, a sdCDR2 of SEQ ID NO:147 and a sdCDR3 of SEQ ID NO:148;
(g) a set of CDRs comprising a sdCDR1 of SEQ ID NO:150, a sdCDR2 of SEQ ID NO:151 and a sdCDR3 of SEQ ID NO:152;
(h) a set of CDRs comprising a sdCDR1 of SEQ ID NO:154, a sdCDR2 of SEQ ID NO:155, and a sdCDR3 of SEQ ID NO:156;
(i) a set of CDRs comprising a sdCDR1 of SEQ ID NO:158, a sdCDR2 of SEQ ID NO:159, and a sdCDR3 of SEQ ID NO:160;
(j) a set of CDRs comprising a sdCDR1 of SEQ ID NO:162, a sdCDR2 of SEQ ID NO:163, and a sdCDR3 of SEQ ID NO:164;
(k) a set of CDRs comprising a sdCDR1 of SEQ ID NO:166, a sdCDR2 of SEQ ID NO:167, and a sdCDR3 of SEQ ID NO:168;
(l) a set of CDRs comprising a sdCDR1 of SEQ ID NO:170, a sdCDR2 of SEQ ID NO:171, and a sdCDR3 of SEQ ID NO:172;
(m) a set of CDRs comprising a sdCDR1 of SEQ ID NO:174, a sdCDR2 of SEQ ID NO:175, and a sdCDR3 of SEQ ID NO:176;
(n) a set of CDRs comprising a sdCDR1 of SEQ ID NO:178, a sdCDR2 of SEQ ID NO:179, and a sdCDR3 of SEQ ID NO:180;
(o) a set of CDRs comprising a sdCDR1 of SEQ ID NO:182, a sdCDR2 of SEQ ID NO:183, and a sdCDR3 of SEQ ID NO:184;
(p) a set of CDRs comprising a sdCDR1 of SEQ ID NO:186, a sdCDR2 of SEQ ID NO:187, and a sdCDR3 of SEQ ID NO:188;
(q) a set of CDRs comprising a sdCDR1 of SEQ ID NO:190, a sdCDR2 of SEQ ID NO:191, and a sdCDR3 of SEQ ID NO:192;
(r) a set of CDRs comprising a sdCDR1 of SEQ ID NO:194, a sdCDR2 of SEQ ID NO:195, and a sdCDR3 of SEQ ID NO:196;
(s) a set of CDRs comprising a sdCDR1 of SEQ ID NO:198, a sdCDR2 of SEQ ID NO:199, and a sdCDR3 of SEQ ID NO:200;
(t) a set of CDRs comprising a sdCDR1 of SEQ ID NO:202, a sdCDR2 of SEQ ID NO:203, and a sdCDR3 of SEQ ID NO:204;
(u) a set of CDRs comprising a sdCDR1 of SEQ ID NO:206, a sdCDR2 of SEQ ID NO:207, and a sdCDR3 of SEQ ID NO:203;
(v) a set of CDRs comprising a sdCDR1 of SEQ ID NO:210, a sdCDR2 of SEQ ID NO:211, and a sdCDR3 of SEQ ID NO:212;
(w) a set of CDRs comprising a sdCDR1 of SEQ ID NO:214, a sdCDR2 of SEQ ID NO:215, and a sdCDR3 of SEQ ID NO:216;
(x) a set of CDRs comprising a sdCDR1 of SEQ ID NO:218, a sdCDR2 of SEQ ID NO:219, and a sdCDR3 of SEQ ID NO:220;
(y) a set of CDRs comprising a sdCDR1 of SEQ ID NO:222, a sdCDR2 of SEQ ID NO:223, and a sdCDR3 of SEQ ID NO:224;
(z) a set of CDRs comprising a sdCDR1 of SEQ ID NO:226, a sdCDR2 of SEQ ID NO:227, and a sdCDR3 of SEQ ID NO:228;
(aa) a set of CDRs comprising a sdCDR1 of SEQ ID NO:230, a sdCDR2 of SEQ ID NO:231, and a sdCDR3 of SEQ ID NO:232;
(ab) a set of CDRs comprising a sdCDR1 of SEQ ID NO:234, a sdCDR2 of SEQ ID NO:235, and a sdCDR3 of SEQ ID NO:236;
(ac) a set of CDRs comprising a sdCDR1 of SEQ ID NO:238, a sdCDR2 of SEQ ID NO:239, and a sdCDR3 of SEQ ID NO:240; and
(ad) a set of CDRs comprising a sdCDR1 of SEQ ID NO:242, a sdCDR2 of SEQ ID NO:243, and a sdCDR3 with SEQ ID NO:244;
(ae) SEQ ID NO:141; (af) SEQ ID NO: 145; (ag) SEQ ID NO:149; (ah) SEQ ID NO: 153; (ai) SEQ ID NO:157; (aj) SEQ ID NO:161; (ak) SEQ ID NO:165; (al) SEQ ID NO: 169; (am) SEQ ID NO:173; (an) SEQ ID NO:177; (ao) SEQ ID NO:181; (ap) SEQ ID NO:185; (aq) SEQ ID NO:189; (ar) SEQ ID NO:193; (as) SEQ ID NO:197; (at) SEQ ID NO:201; (au) SEQ ID NO:205; (av) SEQ ID NO:209; (aw) SEQ ID NO:213; (ax) SEQ ID NO:217; (ay) SEQ ID NO:221; (az) SEQ ID NO:225; (ba) SEQ ID NO:229; (bb) SEQ ID NO:233; (bc) SEQ ID NO:237; and (bd) SEQ ID NO:241.

26. The fusion protein of any one of claims 20-25, wherein the sdABD-LyPD3 comprises an amino acid sequence selected from the group consisting of:
(a) a set of CDRs comprising a sdCDR1 of SEQ ID NO:118, a sdCDR2 of SEQ ID NO:119 and a sdCDR3 of SEQ ID NO:120;
(b) a set of CDRs comprising a sdCDR1 of SEQ ID NO:122, a sdCDR2 of SEQ ID NO:123 and a sdCDR3 of SEQ ID NO:124;
(c) a set of CDRs comprising a sdCDR1 of SEQ ID NO:126, a sdCDR2 of SEQ ID NO:127 and a sdCDR3 of SEQ ID NO:128;
(d) a set of CDRs comprising a sdCDR1 of SEQ ID NO:130, a sdCDR2 of SEQ ID NO:131, and a sdCDR3 of SEQ ID NO:132;
(e) a set of CDRs comprising a sdCDR1 of SEQ ID NO:134, a sdCDR2 of SEQ ID NO:135, and a sdCDR3 of SEQ ID NO:136;
(f) a set of CDRs comprising a sdCDR1 of SEQ ID NO:138, a sdCDR2 of SEQ ID NO:139, and a sdCDR3 of SEQ ID NO:140;
(g) SEQ ID NO:117; (h) SEQ ID NO:121; (i) SEQ ID NO:125; (j) SEQ ID NO:129; (k) SEQ ID NO:133; and (1) SEQ ID NO: 137.

27. The fusion protein of any one of claims 20 and 24-26, wherein the sdABD-B7H3 comprises an amino acid sequence selected from the group consisting of:
(i) a set of CDRs comprising a sdCDR1 of SEQ ID NO:34 a sdCDR2 of SEQ ID NO:35 and a sdCDR3 of SEQ ID NO:36; (ii) a set of CDRs comprising a sdCDR1 of SEQ ID NO:38, a sdCDR2 of SEQ ID NO:39 and a sdCDR3 of SEQ ID NO:40; (iii) a set of CDRs comprising a sdCDR1 of SEQ ID NO:42, a sdCDR2 of SEQ ID NO:43 and a sdCDR3 of SEQ ID NO:44; (iv) a set of CDRs comprising a sdCDR1 of SEQ ID NO:46, a sdCDR2 of SEQ ID NO:47 and a sdCDR3 of SEQ ID NO:48; (v) a set of CDRs comprising a sdCDR1 of SEQ ID NO:50, a sdCDR2 of SEQ ID NO:51 and a sdCDR3 of SEQ ID NO:52; (vi) a set of CDRs comprising a sdCDR1 of SEQ ID NO:54, a sdCDR2 of SEQ ID NO:55 and a sdCDR3 of SEQ ID NO:56; (vii) a set of CDRs comprising a sdCDR1 of SEQ ID NO:58, a sdCDR2 of SEQ ID NO: 59 and a sdCDR3 of SEQ ID NO:60; (ix) SEQ ID NO:33; (x) SEQ ID NO:37; (xi) SEQ ID NO: 41; (xii) SEQ ID NO:45; (xiii) SEQ ID NO:49; (xiv) SEQ ID NO: 53; and (xv) SEQ ID NO:57.

28. The fusion protein of any one of claims 20 and 24-26, wherein the sdABD-CA9 comprises an amino acid sequence selected from the group consisting of:
(i) a set of CDRs comprising a sdCDR1 of SEQ ID NO:102, a sdCDR2 of SEQ ID NO:103 and a sdCDR3 of SEQ ID NO:104; (ii) a set of CDRs comprising a sdCDR1 of SEQ ID NO:106, a sdCDR2 of SEQ ID NO:107 and a sdCDR3 of SEQ ID NO:108; (iii) a set of CDRs comprising a sdCDR1 of SEQ ID NO:110, a sdCDR2 of SEQ ID NO:111 and a sdCDR3 of SEQ ID NO:112; (iv) a set of CDRs comprising a sdCDR1 of SEQ ID NO:114, a sdCDR2 of SEQ ID NO: 115 and a sdCDR3 of SEQ ID NO:116; (v) SEQ ID NO:101; (vi) SEQ ID NO:105; (vii) SEQ ID NO:109; and (viiii) SEQ ID NO:113.

29. The fusion protein any one of claims 20 and 24-26, wherein the sdABD-EGFR comprises an amino acid sequence selected from the group consisting of: (i) a set of CDRs comprising a sdCDR1 of SEQ ID NO:2 a sdCDR2 of SEQ ID NO:3 and a sdCDR3 of SEQ ID NO:4; (ii) a set of CDRs comprising a sdCDR1 of SEQ ID NO:6, a sdCDR2 of SEQ ID NO:7 and a sdCDR3 of SEQ ID NO:8; (iii) a set of CDRs comprising a sdCDR1 of SEQ ID NO:10, a sdCDR2 of SEQ ID NO:11 and a sdCDR3 of SEQ ID NO:12; (iv) a set of CDRs comprising a sdCDR1 of SEQ ID NO:14, a sdCDR2 of SEQ ID NO:15 and a sdCDR3 of SEQ ID NO:16; (v) a set of CDRs comprising a sdCDR1 of SEQ ID NO: 18, a sdCDR2 of SEQ ID NO: 19 and a sdCDR3 of SEQ ID NO:20; (vi) SEQ ID NO: 1; (vii) SEQ ID NO:5; (viii) SEQ ID NO:9; (ix) SEQ ID NO:13; and (x) SEQ ID NO: 17.

30. The fusion protein of any one of claims 20 and 24-26, wherein the sdABD-EpCAM comprises an amino acid sequence selected from the group consisting of:
(i) a set of CDRs comprising a sdCDR1 of SEQ ID NO:62 a sdCDR2 of SEQ ID NO:63 and a sdCDR3 of SEQ ID NO:64; (ii) a set of CDRs comprising a sdCDR1 of SEQ ID NO:66, a sdCDR2 of SEQ ID NO:67 and a sdCDR3 of SEQ ID NO:68; (iii) a set of CDRs comprising a sdCDR1 of SEQ ID NO:70, a sdCDR2 of SEQ ID NO: 71 and a sdCDR3 of SEQ ID NO:72; (iv) a set of CDRs comprising a sdCDR1 of SEQ ID NO:74, a sdCDR2 of SEQ ID NO:75 and a sdCDR3 of SEQ ID NO:76; (v) a set of CDRs comprising a sdCDR1 of SEQ ID NO:496, a sdCDR2 of SEQ ID NO:497 and a sdCDR3 of SEQ ID NO:498; (vi) SEQ ID NO:61; (vii) SEQ ID NO:65; (viii) SEQ ID NO:69; (ix) SEQ ID NO:73; and (x) SEQ ID NO:495.

31. The fusion protein of any one of claims 20 and 24-26, wherein the sdABD-FOLR1 comprises an amino acid sequence selected from the group consisting of:
(i) a set of CDRs comprising a sdCDR1 of SEQ ID NO:22 a sdCDR2 of SEQ ID NO:23 and a sdCDR3 of SEQ ID NO:24; (ii) a set of CDRs comprising a sdCDR1 of SEQ ID NO:26, a sdCDR2 of SEQ ID NO:27 and a sdCDR3 of SEQ ID NO:28; (iii) a set of CDRs comprising a sdCDR1 of SEQ ID NO:30, a sdCDR2 of SEQ ID NO:31 and a sdCDR3 of SEQ ID NO:32; (iv) SEQ ID NO:21; (v) SEQ ID NO:25; and (vi) SEQ ID NO:29.

32. The fusion protein of any one of claims 20 and 24-26, wherein the sdABD-Trop2 comprises an amino acid sequence selected from the group consisting of:
(i) a set of CDRs comprising a sdCDR1 of SEQ ID NO:78, a sdCDR2 of SEQ ID NO:79 and a sdCDR3 of SEQ ID NO:80; (ii) a set of CDRs comprising a sdCDR1 of SEQ ID NO:82, a sdCDR2 of SEQ ID NO:83 and a sdCDR3 of SEQ ID NO: 84; (iii) a set of CDRs comprising a sdCDR1 of SEQ ID NO:86, a sdCDR2 of SEQ ID NO: 87 and a sdCDR3 of SEQ ID NO:88; (iv) a set of CDRs comprising a sdCDR1 of SEQ ID NO:90, a sdCDR2 of SEQ ID NO:91, and a sdCDR3 of SEQ ID NO:92; (v) a set of CDRs comprising a sdCDR1 of SEQ ID NO:94, a sdCDR2 of SEQ ID NO:95, and a sdCDR3 of SEQ ID NO:96; (vi) a set of CDRs comprising a sdCDR1 of SEQ ID NO:98, a sdCDR2 of SEQ ID NO:99, and a sdCDR3 of SEQ ID NO: 100; (vii) SEQ ID NO:77; (viii) SEQ ID NO:81; (ix) SEQ ID NO:85; (x) SEQ ID NO: 89; (xi) SEQ ID NO: 93; and (xii) SEQ ID NO: 97.

33. The fusion protein of any one of claims 20-32, wherein the first variable heavy domain is N-terminal to the first variable light domain and the pseudo variable light domain is N-terminal to the pseudo variable heavy domain.

34. The fusion protein of any one of claims 20-32, wherein the first variable heavy domain is N-terminal to the first variable light domain and the pseudo variable heavy domain is N-terminal to the pseudo variable light domain.

35. The fusion protein of any one of claims 20-32, wherein the first variable light domain is N-terminal to the first variable heavy domain and the pseudo variable light domain is N-terminal to the pseudo variable heavy domain.

36. The fusion protein any one of claims 20-32, wherein the first variable light domain is N-terminal to the first variable heavy domain and the pseudo variable heavy domain is N-terminal to the pseudo variable light domain.

37. The fusion protein of any one of claims 20-36, wherein the third sdABD that bind to HSA has an amino acid sequence comprising: (a) set of CDRs selected from the group consisting of (i) a sdCDR1 of SEQ ID NO:246, a sdCDR2 of SEQ ID NO:247, and a sdCDR3 of SEQ ID NO:248, and (ii) a sdCDR1 of SEQ ID NO:250, a sdCDR2 of SEQ ID NO:251, and a sdCDR3 of SEQ ID NO:252; or (b) an amino acid sequence selected from the group consisting of SEQ ID NO:245 and SEQ ID NO:249.

38. The fusion protein of any one of claims 20-37, wherein the cleavable linker comprises a cleavage domain sequence selected from the group consisting of SEQ ID NOS:339-408 and 532-535.

39. The fusion protein of any one of claims 20-38, wherein the cleavable linker is cleaved by a human protease selected from the group consisting of MMP2, MMP9, meprin A, meprin B, cathepsin S, capthepsin K, capthesin L, granzyme B, uPA, kallekriein7, matriptase, and thrombin.

40. The fusion protein of any one of claims 20-39, comprising an amino acid sequence selected from the group consisting of SEQ ID NO:453, SEQ ID NO:454, SEQ ID NO:455, SEQ ID NO:456, SEQ ID NO:457, and SEQ ID NO:458.

41. A nucleic acid encoding the fusion protein of any one of claim 20-40.

42. An expression vector comprising the nucleic acid of claim 41.

43. A host cell comprising the expression vector of claim 42.

44. A method of making a fusion protein comprising (a) culturing the host cell of claim 43 under conditions wherein the fusion protein is expressed and (b) recovering the fusion protein.

45. A single domain antigen binding domain that binds human LyPD3 (sdABD-LyPD3) comprising (i) an amino acid sequence selected from the group consisting of SEQ ID NO:117, SEQ ID NO:121, SEQ ID NO:125, SEQ ID NO:129, SEQ ID NO:133 and, SEQ ID NO:137 or (ii) an amino acid sequence comprising a set of CDRs selected from the group consisting of: (a) a sdCDR1 of SEQ ID NO:118, a sdCDR2 of SEQ ID NO:119 and a sdCDR3 of SEQ ID NO:120; (b) a sdCDR1 of SEQ ID NO:122, a sdCDR2 of SEQ ID NO:123 and a sdCDR3 of SEQ ID NO:124; (c) a sdCDR1 of SEQ ID NO:126, a sdCDR2 of SEQ ID NO:127 and a sdCDR3 of SEQ ID NO: 128; (d) a sdCDR1 of SEQ ID NO:130, a sdCDR2 of SEQ ID NO:131, and a sdCDR3 of SEQ ID NO:132; (e) a sdCDR1 of SEQ ID NO:134, a sdCDR2 of SEQ ID NO: 135, and a sdCDR3 of SEQ ID NO:136; and (f) a sdCDR1 of SEQ ID NO:138, a sdCDR2 of SEQ ID NO:139, and a sdCDR3 of SEQ ID NO:140.

46. A nucleic acid encoding the single domain antigen binding domain (sdABD) of claim 19 or 45.

47. An expression vector comprising the nucleic acid of claim 46.

48. A host cell comprising the expression vector of claim 47.

49. A method of making a single domain antigen binding domain (sdABD) comprising (a) culturing the host cell of claim 48 under conditions wherein the sdABD is expressed and (b) recovering the sdABD.

50. A pharmaceutical composition comprising the fusion protein of any one of claims 1-13 and 20-40 or the single domain antigen binding domain (sdABD) of claim 19 or 45.

51. The pharmaceutical composition of claim 50, further comprising a pharmaceutically acceptable carrier or excipient.

52. A method of treating cancer in a subject comprising administering the fusion protein of any one of claims 1-13 and 20-40, the single domain antigen binding domain (sdABD) of claim 19 or 45, or the pharmaceutical composition of claim 50 or 51.

The application's sequence listing, which the Patent Office published only in electronic form, follows.

SEQUENCE LISTING (535 sequences)

SEQ ID NO: 1 - protein, 127 aa, Artificial Sequence
  Description of Artificial Sequence: Synthetic polypeptide
  alpha-EGFR1
EVQLVESGGGLVQAGGSLRLSCAASGRTFSSYAMGWFRQAPGKEREFVVAINWSSGSTYYADSVKGRFTISRDNAKNTMYLQMNSLKPEDTAVYYCAAGYQINSGNYNFKDYEYDYWGQGTQVTVSS

SEQ ID NO: 2 - protein, 10 aa, Artificial Sequence
  Description of Artificial Sequence: Synthetic peptide
  alpha-EGFR1 sdCDR1
GRTFSSYAMG

SEQ ID NO: 3 - protein, 16 aa, Artificial Sequence
  Description of Artificial Sequence: Synthetic peptide
  alpha-EGFR1 sdCDR2
INWSSGSTYYADSVKG

SEQ ID NO: 4 - protein, 18 aa, Artificial Sequence
  Description of Artificial Sequence: Synthetic peptide
  alpha-EGFR1 sdCDR3
GYQINSGNYNFKDYEYDY

SEQ ID NO: 5 - protein, 124 aa, Artificial Sequence
  Description of Artificial Sequence: Synthetic polypeptide
  alpha-EGFR2
QVKLEESGGGSVQTGGSLRLTCAASGRTSRSYGMGWFRQAPGKEREFVSGISWRGDSTGYADSVKGRFTISRDNAKNTVDLQMNSLKPEDTAIYYCAAAAGSAWYGTLYEYDYWGQGTQVTVSS

SEQ ID NO: 6 - protein, 10 aa, Artificial Sequence
  Description of Artificial Sequence: Synthetic peptide
  alpha-EGFR2 sdCDR1
GRTSRSYGMG

SEQ ID NO: 7 - protein, 17 aa, Artificial Sequence
  Description of Artificial Sequence: Synthetic peptide
  alpha-EGFR2 sdCDR2
GISWRGDSTGYADSVKG

SEQ ID NO: 8 - protein, 15 aa, Artificial Sequence
  Description of Artificial Sequence: Synthetic peptide
  alpha-EGFR2 sdCDR3
AAGSAWYGTLYEYDY

SEQ ID NO: 9 - protein, 127 aa, Artificial Sequence
  Description of Artificial Sequence: Synthetic polypeptide
  h-alpha-EGFR1
EVQLVESGGGLVQPGGSLRLSCAASGRTFSSYAMGWFRQAPGKEREFVVAINWSSGSTYYADSVKGRFTISRDNSKNTLYLQMNSLRAEDTAVYYCAAGYQINSGNYNFKDYEYDYWGQGTLVTVSS

SEQ ID NO: 10 - protein, 10 aa, Artificial Sequence
  Description of Artificial Sequence: Synthetic peptide
  h-alpha-EGFR1 sdCDR1
GRTFSSYAMG

SEQ ID NO: 11 - protein, 16 aa, Artificial Sequence
  Description of Artificial Sequence: Synthetic peptide
  h-alpha-EGFR1 sdCDR2
INWSSGSTYYADSVKG

SEQ ID NO: 12 - protein, 18 aa, Artificial Sequence
  Description of Artificial Sequence: Synthetic peptide
  h-alpha-EGFR1 sdCDR3
GYQINSGNYNFKDYEYDY

SEQ ID NO: 13 - protein, 124 aa, Artificial Sequence
  Description of Artificial Sequence: Synthetic polypeptide
  aEGFR2a sdAb
EVQLVESGGGVVRPGGSLRLSCAASGRTSRSYGMGWFRQAPGKEREFVSGISWRGDSTGYADSVKGRFTISRDNAKNSLYLQMNSLRAEDTALYYCAAAAGSAWYGTLYEYDYWGQGTLVTVSS

SEQ ID NO: 14 - protein, 10 aa, Artificial Sequence
  Description of Artificial Sequence: Synthetic peptide
  aEGFR2a sdAb sdCDR1
GRTSRSYGMG

SEQ ID NO: 15 - protein, 17 aa, Artificial Sequence
  Description of Artificial Sequence: Synthetic peptide
  aEGFR2a sdAb sdCDR2
GISWRGDSTGYADSVKG

SEQ ID NO: 16 - protein, 15 aa, Artificial Sequence
  Description of Artificial Sequence: Synthetic peptide
  aEGFR2a sdAb sdCDR3
AAGSAWYGTLYEYDY

SEQ ID NO: 17 - protein, 124 aa, Artificial Sequence
  Description of Artificial Sequence: Synthetic polypeptide
  h-alpha-EGFR2d
QVKLVESGGGVVRPGGSLTLSCAASGRTSRSYGMGWFRQAPGKEREFVSGISWRGDSTGYADSVKGRFTISRDNAKNSLYLQMNSLRAEDTALYYCAAAAGSAWYGTLYEYDYWGQGTLVTVSS

SEQ ID NO: 18 - protein, 10 aa, Artificial Sequence
  Description of Artificial Sequence: Synthetic peptide
  h-alpha-EGFR2d  sdCDR1
GRTSRSYGMG

SEQ ID NO: 19 - protein, 17 aa, Artificial Sequence
  Description of Artificial Sequence: Synthetic peptide
  h-alpha-EGFR2d  sdCDR2
GISWRGDSTGYADSVKG

SEQ ID NO: 20 - protein, 15 aa, Artificial Sequence
  Description of Artificial Sequence: Synthetic peptide
  h-alpha-EGFR2d  sdCDR3
AAGSAWYGTLYEYDY

SEQ ID NO: 21 - protein, 114 aa, Artificial Sequence
  Description of Artificial Sequence: Synthetic polypeptide
  alpha-FOLR1 h77-2
QVQLVESGGGLVQPGGSLRLSCAASGFTVSNSVMAWYRQTPGNEREFVAIINSIGITNYADSVKGRFTISRDNSKNTLYLQMNSLRAEDTAVYVCNRNFDRIYWGQGTLVTVSS

SEQ ID NO: 22 - protein, 10 aa, Artificial Sequence
  Description of Artificial Sequence: Synthetic peptide
  alpha-FOLR1 h77-2 sdCDR1
GFTVSNSVMA

SEQ ID NO: 23 - protein, 16 aa, Artificial Sequence
  Description of Artificial Sequence: Synthetic peptide
  alpha-FOLR1 h77-2 sdCDR2
IINSIGITNYADSVKG

SEQ ID NO: 24 - protein, 6 aa, Artificial Sequence
  Description of Artificial Sequence: Synthetic peptide
  alpha-FOLR1 h77-2 sdCDR3
NFDRIY

SEQ ID NO: 25 - protein, 113 aa, Artificial Sequence
  Description of Artificial Sequence: Synthetic polypeptide
  alpha-FOLR1 h59.3
QVQLVESGGGLVQPGGSLRLSCAAPGNTFSISAMGWYRQAPGKQREWVAVTHSDYSTNYADSVKGRFTISRDNSKNTLYLQMNSLRAEDTAVYYCKHYGIDYWGQGTLVTVSS

SEQ ID NO: 26 - protein, 10 aa, Artificial Sequence
  Description of Artificial Sequence: Synthetic peptide
  alpha-FOLR1 h59.3 sdCDR1
GNTFSISAMG

SEQ ID NO: 27 - protein, 16 aa, Artificial Sequence
  Description of Artificial Sequence: Synthetic peptide
  alpha-FOLR1 h59.3 sdCDR2
VTHSDYSTNYADSVKG

SEQ ID NO: 28 - protein, 5 aa, Artificial Sequence
  Description of Artificial Sequence: Synthetic peptide
  alpha-FOLR1 h59.3 sdCDR3
YGIDY

SEQ ID NO: 29 - protein, 117 aa, Artificial Sequence
  Description of Artificial Sequence: Synthetic polypeptide
  alpha-FOLR1 h22-4
QVQLVESGGGLVQPGGSLRLSCEASGTTFSRDVMGWYRQAPGKQRELVAIISRGGSTNYADSVKGRFTISRDNSKNTLYLQMNSLRAEDTAVYYCNANTATWGRVFWGQGTLVTVSS

SEQ ID NO: 30 - protein, 10 aa, Artificial Sequence
  Description of Artificial Sequence: Synthetic peptide
  alpha-FOLR1 h22-4 sdCDR1
GTTFSRDVMG

SEQ ID NO: 31 - protein, 16 aa, Artificial Sequence
  Description of Artificial Sequence: Synthetic peptide
  alpha-FOLR1 h22-4 sdCDR2
IISRGGSTNYADSVKG

SEQ ID NO: 32 - protein, 9 aa, Artificial Sequence
  Description of Artificial Sequence: Synthetic peptide
  alpha-FOLR1 h22-4 sdCDR3
NTATWGRVF

SEQ ID NO: 33 - protein, 124 aa, Artificial Sequence
  Description of Artificial Sequence: Synthetic polypeptide
  alpha-B7H3 hF7
QVQLQESGGGLVQPGGSLRLSCAPSRRTFHTYHMGWFRQAPGKEREFVAVINWSGGSTVYADSVKGRFTISRDNSKNTLYLQMNSLRAEDTAVYYCAAGGATTQRATEASYDYWGQGTLVTVSS

SEQ ID NO: 34 - protein, 10 aa, Artificial Sequence
  Description of Artificial Sequence: Synthetic peptide
  alpha-B7H3 hF7 sdCDR1
RRTFHTYHMG

SEQ ID NO: 35 - protein, 17 aa, Artificial Sequence
  Description of Artificial Sequence: Synthetic peptide
  alpha-B7H3 hF7 sdCDR2
VINWSGGSTVYADSVKG

SEQ ID NO: 36 - protein, 15 aa, Artificial Sequence
  Description of Artificial Sequence: Synthetic peptide
  alpha-B7H3 hF7 sdCDR3
GGATTQRATEASYDY

SEQ ID NO: 37 - protein, 122 aa, Artificial Sequence
  Description of Artificial Sequence: Synthetic polypeptide
  alpha-B7H3 hF12
QVQLQESGGGLVQPGGSLRLSCEASPRTFSTYSMAWFRQAPGKERSFVAAINWSGGNTSYADSVKGRFTISRDNSKNTLYLQMNSLRAEDTAVYYCAAGGVLAHHNYEYDYWGQGTLVTVSS

SEQ ID NO: 38 - protein, 10 aa, Artificial Sequence
  Description of Artificial Sequence: Synthetic peptide
  alpha-B7H3 hF12 sdCDR1
PRTFSTYSMA

SEQ ID NO: 39 - protein, 17 aa, Artificial Sequence
  Description of Artificial Sequence: Synthetic peptide
  alpha-B7H3 hF12 sdCDR2
AINWSGGNTSYADSVKG

SEQ ID NO: 40 - protein, 13 aa, Artificial Sequence
  Description of Artificial Sequence: Synthetic peptide
  alpha-B7H3 hF12 sdCDR3
GGVLAHHNYEYDY

SEQ ID NO: 41 - protein, 122 aa, Artificial Sequence
  Description of Artificial Sequence: Synthetic polypeptide
  alpha-B7H3 hF12 (N57Q)
QVQLQESGGGLVQPGGSLRLSCEASPRTFSTYSMAWFRQAPGKERSFVAAINWSGGQTSYADSVKGRFTISRDNSKNTLYLQMNSLRAEDTAVYYCAAGGVLAHHNYEYDYWGQGTLVTVSS

SEQ ID NO: 42 - protein, 10 aa, Artificial Sequence
  Description of Artificial Sequence: Synthetic peptide
  alpha-B7H3 hF12 (N57Q) sdCDR1
PRTFSTYSMA

SEQ ID NO: 43 - protein, 17 aa, Artificial Sequence
  Description of Artificial Sequence: Synthetic peptide
  alpha-B7H3 hF12 (N57Q) sdCDR2
AINWSGGQTSYADSVKG

SEQ ID NO: 44 - protein, 13 aa, Artificial Sequence
  Description of Artificial Sequence: Synthetic peptide
  alpha-B7H3 hF12 (N57Q) sdCDR3
GGVLAHHNYEYDY

SEQ ID NO: 45 - protein, 122 aa, Artificial Sequence
  Description of Artificial Sequence: Synthetic polypeptide
  alpha-B7H3 hF12 (N57E)
QVQLQESGGGLVQPGGSLRLSCEASPRTFSTYSMAWFRQAPGKERSFVAAINWSGGETSYADSVKGRFTISRDNSKNTLYLQMNSLRAEDTAVYYCAAGGVLAHHNYEYDYWGQGTLVTVSS

SEQ ID NO: 46 - protein, 10 aa, Artificial Sequence
  Description of Artificial Sequence: Synthetic peptide
  alpha-B7H3 hF12 (N57E) sdCDR1
PRTFSTYSMA

SEQ ID NO: 47 - protein, 17 aa, Artificial Sequence
  Description of Artificial Sequence: Synthetic peptide
  alpha-B7H3 hF12 (N57E) sdCDR2
AINWSGGETSYADSVKG

SEQ ID NO: 48 - protein, 13 aa, Artificial Sequence
  Description of Artificial Sequence: Synthetic peptide
  alpha-B7H3 hF12 (N57E) sdCDR3
GGVLAHHNYEYDY

SEQ ID NO: 49 - protein, 122 aa, Artificial Sequence
  Description of Artificial Sequence: Synthetic polypeptide
  alpha-B7H3 hF12 (N57D)
QVQLQESGGGLVQPGGSLRLSCEASPRTFSTYSMAWFRQAPGKERSFVAAINWSGGDTSYADSVKGRFTISRDNSKNTLYLQMNSLRAEDTAVYYCAAGGVLAHHNYEYDYWGQGTLVTVSS

SEQ ID NO: 50 - protein, 10 aa, Artificial Sequence
  Description of Artificial Sequence: Synthetic peptide
  alpha-B7H3 hF12 (N57D) sdCDR1
PRTFSTYSMA

SEQ ID NO: 51 - protein, 17 aa, Artificial Sequence
  Description of Artificial Sequence: Synthetic peptide
  alpha-B7H3 hF12 (N57D) sdCDR2
AINWSGGDTSYADSVKG

SEQ ID NO: 52 - protein, 13 aa, Artificial Sequence
  Description of Artificial Sequence: Synthetic peptide
  alpha-B7H3 hF12 (N57D) sdCDR3
GGVLAHHNYEYDY

SEQ ID NO: 53 - protein, 122 aa, Artificial Sequence
  Description of Artificial Sequence: Synthetic polypeptide
  alpha-B7H3 hF12 (S59A)
QVQLQESGGGLVQPGGSLRLSCEASPRTFSTYSMAWFRQAPGKERSFVAAINWSGGNTAYADSVKGRFTISRDNSKNTLYLQMNSLRAEDTAVYYCAAGGVLAHHNYEYDYWGQGTLVTVSS

SEQ ID NO: 54 - protein, 10 aa, Artificial Sequence
  Description of Artificial Sequence: Synthetic peptide
  alpha-B7H3 hF12 (S59A) sdCDR1
PRTFSTYSMA

SEQ ID NO: 55 - protein, 17 aa, Artificial Sequence
  Description of Artificial Sequence: Synthetic peptide
  alpha-B7H3 hF12 (S59A) sdCDR2
AINWSGGNTAYADSVKG

SEQ ID NO: 56 - protein, 13 aa, Artificial Sequence
  Description of Artificial Sequence: Synthetic peptide
  alpha-B7H3 hF12 (S59A) sdCDR3
GGVLAHHNYEYDY

SEQ ID NO: 57 - protein, 122 aa, Artificial Sequence
  Description of Artificial Sequence: Synthetic polypeptide
  alpha-B7H3 hF12 (S59Y)
QVQLQESGGGLVQPGGSLRLSCEASPRTFSTYSMAWFRQAPGKERSFVAAINWSGGNTYYADSVKGRFTISRDNSKNTLYLQMNSLRAEDTAVYYCAAGGVLAHHNYEYDYWGQGTLVTVSS

SEQ ID NO: 58 - protein, 10 aa, Artificial Sequence
  Description of Artificial Sequence: Synthetic peptide
  alpha-B7H3 hF12 (S59Y) sdCDR1
PRTFSTYSMA

SEQ ID NO: 59 - protein, 17 aa, Artificial Sequence
  Description of Artificial Sequence: Synthetic peptide
  alpha-B7H3 hF12 (S59Y) sdCDR2
AINWSGGNTYYADSVKG

SEQ ID NO: 60 - protein, 13 aa, Artificial Sequence
  Description of Artificial Sequence: Synthetic peptide
  alpha-B7H3 hF12 (S59Y) sdCDR3
GGVLAHHNYEYDY

SEQ ID NO: 61 - protein, 122 aa, Artificial Sequence
  Description of Artificial Sequence: Synthetic polypeptide
  alpha-EpCAM h13
QVQLVESGGGLVQPGGSLTLSCAASGTGSIFSINLMGWYRQAPGKQRELVARITSGDSTVYADSVKGRFTISRDNSKNTLYLQMNSLRPEDTAVYYCNLLLRSSPGATTPYWGQGTLVTVSS

SEQ ID NO: 62 - protein, 12 aa, Artificial Sequence
  Description of Artificial Sequence: Synthetic peptide
  alpha-EpCAM h13 sdCDR1
GTGSIFSINLMG

SEQ ID NO: 63 - protein, 16 aa, Artificial Sequence
  Description of Artificial Sequence: Synthetic peptide
  alpha-EpCAM h13 sdCDR2
RITSGDSTVYADSVKG

SEQ ID NO: 64 - protein, 12 aa, Artificial Sequence
  Description of Artificial Sequence: Synthetic peptide
  alpha-EpCAM h13 sdCDR3
LLRSSPGATTPY

SEQ ID NO: 65 - protein, 114 aa, Artificial Sequence
  Description of Artificial Sequence: Synthetic polypeptide
  alpha-EpCAM h23
QVQLVESGGGLVQPGGSLTLSCVISGSFSALWAMRWYRQAPGQQRELVASSRGGTTSYADSVKGRFTISRDNSKNTLYLQMNSLRPEDTAVYYCNAIDGHLAYWGQGTLVTVSS

SEQ ID NO: 66 - protein, 10 aa, Artificial Sequence
  Description of Artificial Sequence: Synthetic peptide
  alpha-EpCAM h23 sdCDR1
GSFSALWAMR

SEQ ID NO: 67 - protein, 15 aa, Artificial Sequence
  Description of Artificial Sequence: Synthetic peptide
  alpha-EpCAM h23 sdCDR2
SSRGGTTSYADSVKG

SEQ ID NO: 68 - protein, 7 aa, Artificial Sequence
  Description of Artificial Sequence: Synthetic peptide
  alpha-EpCAM h23 sdCDR3
IDGHLAY

SEQ ID NO: 69 - protein, 126 aa, Artificial Sequence
  Description of Artificial Sequence: Synthetic polypeptide
  acEpCAM hVIB665
QVQLLESGGGLVQPGGSLRLSCAASGRTFSDYDMGWFRQGPGKEREFVAAISWSGGHTNYADSVKGRFTISRDNSKNTLYLQMNSLRAEDTAVYYCAADLRFTGGDTTTPETYDYWGQGTLVTVSS

SEQ ID NO: 70 - protein, 10 aa, Artificial Sequence
  Description of Artificial Sequence: Synthetic peptide
  acEpCAM hVIB665  sdCDR1
GRTFSDYDMG

SEQ ID NO: 71 - protein, 17 aa, Artificial Sequence
  Description of Artificial Sequence: Synthetic peptide
  acEpCAM hVIB665  sdCDR2
AISWSGGHTNYADSVKG

SEQ ID NO: 72 - protein, 17 aa, Artificial Sequence
  Description of Artificial Sequence: Synthetic peptide
  acEpCAM hVIB665  sdCDR3
DLRFTGGDTTTPETYDY

SEQ ID NO: 73 - protein, 126 aa, Artificial Sequence
  Description of Artificial Sequence: Synthetic polypeptide
  acEpCAM hVIB666
QVQLVESGGGLVQPGRSLRLSCAASGRTLDNYDMGWFRQGPGKEREFVAAISWSGGSTDYAYSVTGRFTISRDNAKNSLYLQMNSLRAEDTALYYCAADLRFTGGDTMTPETYDYWGQGTLVTVSS

SEQ ID NO: 74 - protein, 10 aa, Artificial Sequence
  Description of Artificial Sequence: Synthetic peptide
  acEpCAM hVIB666  sdCDR1
GRTLDNYDMG

SEQ ID NO: 75 - protein, 17 aa, Artificial Sequence
  Description of Artificial Sequence: Synthetic peptide
  acEpCAM hVIB666  sdCDR2
AISWSGGSTDYAYSVTG

SEQ ID NO: 76 - protein, 17 aa, Artificial Sequence
  Description of Artificial Sequence: Synthetic peptide
  acEpCAM hVIB666  sdCDR3
DLRFTGGDTMTPETYDY

SEQ ID NO: 77 - protein, 129 aa, Artificial Sequence
  Description of Artificial Sequence: Synthetic polypeptide
  aTrop2 hVIB557
QVQLLESGGGLVQPGGSLRLSCAASGRTFSSQSMGWFRQAPGKEREFVSAISWTGANPTYADSVKGRFTISRDNSKNTLYLQMNSLRAEDTAVYYCAADTSGGSYYYERATAETSYDYWGQGTLVTVSS

SEQ ID NO: 78 - protein, 10 aa, Artificial Sequence
  Description of Artificial Sequence: Synthetic peptide
  aTrop2 hVIB557 sdCDR1
GRTFSSQSMG

SEQ ID NO: 79 - protein, 17 aa, Artificial Sequence
  Description of Artificial Sequence: Synthetic peptide
  aTrop2 hVIB557 sdCDR2
AISWTGANPTYADSVKG

SEQ ID NO: 80 - protein, 20 aa, Artificial Sequence
  Description of Artificial Sequence: Synthetic peptide
  aTrop2 hVIB557 sdCDR3
DTSGGSYYYERATAETSYDY

SEQ ID NO: 81 - protein, 128 aa, Artificial Sequence
  Description of Artificial Sequence: Synthetic polypeptide
  aTrop2 hVIB565
QVQLLESGGGLVQPGGSLRLSCAASGFTFDYYAIGWFRQAPGKEREGVSCISSSHGSTYYADSVKGRFTISRDNSKNTVYLQMNSLRAEDTAVYYCATAGDGGDYHCSGLVDYGMDYWGKGTLVTVSS

SEQ ID NO: 82 - protein, 10 aa, Artificial Sequence
  Description of Artificial Sequence: Synthetic peptide
  aTrop2 hVIB565 sdCDR1
GFTFDYYAIG

SEQ ID NO: 83 - protein, 17 aa, Artificial Sequence
  Description of Artificial Sequence: Synthetic peptide
  aTrop2 hVIB565 sdCDR2
CISSSHGSTYYADSVKG

SEQ ID NO: 84 - protein, 19 aa, Artificial Sequence
  Description of Artificial Sequence: Synthetic peptide
  aTrop2 hVIB565 sdCDR3
AGDGGDYHCSGLVDYGMDY

SEQ ID NO: 85 - protein, 123 aa, Artificial Sequence
  Description of Artificial Sequence: Synthetic polypeptide
  aTrop2 hVIB575
QVQLLESGGGLVQPGGSLRLSCLASGRTVGRTAMGWFRQPPGKEREFVATISWAGGTTYYADFVKGRFTISRDNSKNTLYLQMNSLRAEDTAVYYCAASEPYSDYDPSGMVYWGKGTLVTVSS

SEQ ID NO: 86 - protein, 10 aa, Artificial Sequence
  Description of Artificial Sequence: Synthetic peptide
  aTrop2 hVIB575 sdCDR1
GRTVGRTAMG

SEQ ID NO: 87 - protein, 17 aa, Artificial Sequence
  Description of Artificial Sequence: Synthetic peptide
  aTrop2 hVIB575 sdCDR2
TISWAGGTTYYADFVKG

SEQ ID NO: 88 - protein, 14 aa, Artificial Sequence
  Description of Artificial Sequence: Synthetic peptide
  aTrop2 hVIB575 sdCDR3
SEPYSDYDPSGMVY

SEQ ID NO: 89 - protein, 123 aa, Artificial Sequence
  Description of Artificial Sequence: Synthetic polypeptide
  aTrop2 hVIB578
QVQLLESGGGLVQPGGSLRLSCAASGRTFGRAAMGWFRQPPGKEREFAATISWSGSNTYYADFVKGRFTISRDNSKNTVYLQMNSLRAEDTAVYYCAASEPYSDYDPSGMVYWGKGTLVTVSS

SEQ ID NO: 90 - protein, 10 aa, Artificial Sequence
  Description of Artificial Sequence: Synthetic peptide
  aTrop2 hVIB578 sdCDR1
GRTFGRAAMG

SEQ ID NO: 91 - protein, 17 aa, Artificial Sequence
  Description of Artificial Sequence: Synthetic peptide
  aTrop2 hVIB578 sdCDR2
TISWSGSNTYYADFVKG

SEQ ID NO: 92 - protein, 14 aa, Artificial Sequence
  Description of Artificial Sequence: Synthetic peptide
  aTrop2 hVIB578 sdCDR3
SEPYSDYDPSGMVY

SEQ ID NO: 93 - protein, 125 aa, Artificial Sequence
  Description of Artificial Sequence: Synthetic polypeptide
  aTrop2 hVIB609
QVQLLESGGGLVQPGGSLRLSCALSGLTFNTYPMAWFRQPPGQEREFVADMSWSGTNTYYADSVKGRFTISRDNSKNTLYLQMNSLRAEDTAVYYCAAGWPYSGTGRSTTDYTYWGQGTLVTVSS

SEQ ID NO: 94 - protein, 10 aa, Artificial Sequence
  Description of Artificial Sequence: Synthetic peptide
  aTrop2 hVIB609 sdCDR1
GLTFNTYPMA

SEQ ID NO: 95 - protein, 17 aa, Artificial Sequence
  Description of Artificial Sequence: Synthetic peptide
  aTrop2 hVIB609 sdCDR2
DMSWSGTNTYYADSVKG

SEQ ID NO: 96 - protein, 16 aa, Artificial Sequence
  Description of Artificial Sequence: Synthetic peptide
  aTrop2 hVIB609 sdCDR3
GWPYSGTGRSTTDYTY

SEQ ID NO: 97 - protein, 126 aa, Artificial Sequence
  Description of Artificial Sequence: Synthetic polypeptide
  aTrop2 hVIB619
QVQLLESGGGLVQPGGSLRLSCAASGRSFSRYGMGWLRQAPGKERELVASISWSGHSTYYADSVKGRFTISRDNSKNTLYLQMNSLRAEDTAVYYCAAESLPYESGSPRLTDFASWGQGTLVTVSS

SEQ ID NO: 98 - protein, 10 aa, Artificial Sequence
  Description of Artificial Sequence: Synthetic peptide
  aTrop2 hVIB619 sdCDR1
GRSFSRYGMG

SEQ ID NO: 99 - protein, 17 aa, Artificial Sequence
  Description of Artificial Sequence: Synthetic peptide
  aTrop2 hVIB619 sdCDR2
SISWSGHSTYYADSVKG

SEQ ID NO: 100 - protein, 17 aa, Artificial Sequence
  Description of Artificial Sequence: Synthetic peptide
  aTrop2 hVIB619 sdCDR3
ESLPYESGSPRLTDFAS

SEQ ID NO: 101 - protein, 119 aa, Artificial Sequence
  Description of Artificial Sequence: Synthetic polypeptide
  aCA9 hVIB456 sdAb
QVQLVESGGGLVQPGGSLRLSCAASGSALIINAMGWYRQAPGKQRELVATVTRSGRTNYADSVKGRFTISRDNSKNTLYLQMNSLRAEDTAVYYCNVALWIADGEYDYWGQGTLVTVSS

SEQ ID NO: 102 - protein, 10 aa, Artificial Sequence
  Description of Artificial Sequence: Synthetic peptide
  aCA9 hVIB456 sdAb  sdCDR1
GSALIINAMG

SEQ ID NO: 103 - protein, 16 aa, Artificial Sequence
  Description of Artificial Sequence: Synthetic peptide
  aCA9 hVIB456 sdAb  sdCDR2
TVTRSGRTNYADSVKG

SEQ ID NO: 104 - protein, 11 aa, Artificial Sequence
  Description of Artificial Sequence: Synthetic peptide
  aCA9 hVIB456 sdAb  sdCDR3
ALWIADGEYDY

SEQ ID NO: 105 - protein, 116 aa, Artificial Sequence
  Description of Artificial Sequence: Synthetic polypeptide
  aCA9 hVIB476 sdAb
QVQLVESGGGLVQPGGSLRLSCAASGNIFIINVMGWYRQAPGKQRELVATITNGGRTHYADSVKGRFTISRDNSKNTLYLQMNSLRAEDTAVYYCNANHIELGDYWGQGTLVTVSS

SEQ ID NO: 106 - protein, 10 aa, Artificial Sequence
  Description of Artificial Sequence: Synthetic peptide
  aCA9 hVIB476 sdAb  sdCDR1
GNIFIINVMG

SEQ ID NO: 107 - protein, 16 aa, Artificial Sequence
  Description of Artificial Sequence: Synthetic peptide
  aCA9 hVIB476 sdAb  sdCDR2
TITNGGRTHYADSVKG

SEQ ID NO: 108 - protein, 8 aa, Artificial Sequence
  Description of Artificial Sequence: Synthetic peptide
  aCA9 hVIB476 sdAb  sdCDR3
NHIELGDY

SEQ ID NO: 109 - protein, 115 aa, Artificial Sequence
  Description of Artificial Sequence: Synthetic polypeptide
  aCA9 hVIB407 sdAb
QVQLVESGGGLVQPGGSLRLSCTASGIIFSVYDMGWYRQTPGKQREFVARITAGGGTYLTDSVKGRFTISRDNSKNTLYLQMNSLRAEDTGVYYCNAAWIGDDYWGQGTLVTVSS

SEQ ID NO: 110 - protein, 10 aa, Artificial Sequence
  Description of Artificial Sequence: Synthetic peptide
  aCA9 hVIB407 sdAb  sdCDR1
GIIFSVYDMG

SEQ ID NO: 111 - protein, 16 aa, Artificial Sequence
  Description of Artificial Sequence: Synthetic peptide
  aCA9 hVIB407 sdAb  sdCDR2
RITAGGGTYLTDSVKG

SEQ ID NO: 112 - protein, 7 aa, Artificial Sequence
  Description of Artificial Sequence: Synthetic peptide
  aCA9 hVIB407 sdAb  sdCDR3
AWIGDDY

SEQ ID NO: 113 - protein, 115 aa, Artificial Sequence
  Description of Artificial Sequence: Synthetic polypeptide
  aCA9 hVIB445 sdAb
QVQLVESGGGLVKPGGSLRLSCAASGITFNLHAMRWYRRAPGKQRELVAYISARDWTNYADSVKGRFTISRDNAKNSLYLQMNSLRAEDTAVYYCNTDLVGEDYWGRGTLVTVSS

SEQ ID NO: 114 - protein, 10 aa, Artificial Sequence
  Description of Artificial Sequence: Synthetic peptide
  aCA9 hVIB445 sdAb  sdCDR1
GITFNLHAMR

SEQ ID NO: 115 - protein, 16 aa, Artificial Sequence
  Description of Artificial Sequence: Synthetic peptide
  aCA9 hVIB445 sdAb  sdCDR2
YISARDWTNYADSVKG

SEQ ID NO: 116 - protein, 7 aa, Artificial Sequence
  Description of Artificial Sequence: Synthetic peptide
  aCA9 hVIB445 sdAb  sdCDR3
DLVGEDY

SEQ ID NO: 117 - protein, 123 aa, Artificial Sequence
  Description of Artificial Sequence: Synthetic polypeptide
  alpha-LyPD3 h787 sdAb
QVQLLESGGGLVQPGGSLRLSCAASGFTLDYYAIGWFRQAPGKEHEAVSCISSSDGSTYYADSVKGRFTISRDNSKNTLYLQMNSLRAEDTAVYYCATVKSCYSDGYALWGSWGQGTLVTVSS

SEQ ID NO: 118 - protein, 10 aa, Artificial Sequence
  Description of Artificial Sequence: Synthetic peptide
  alpha-LyPD3 h787 sdAb  sdCDR1
GFTLDYYAIG

SEQ ID NO: 119 - protein, 17 aa, Artificial Sequence
  Description of Artificial Sequence: Synthetic peptide
  alpha-LyPD3 h787 sdAb  sdCDR2
CISSSDGSTYYADSVKG

SEQ ID NO: 120 - protein, 14 aa, Artificial Sequence
  Description of Artificial Sequence: Synthetic peptide
  alpha-LyPD3 h787 sdAb  sdCDR3
VKSCYSDGYALWGS

SEQ ID NO: 121 - protein, 123 aa, Artificial Sequence
  Description of Artificial Sequence: Synthetic polypeptide
  alpha-LyPD3 h790 sdAb
QVQLLESGGGLVQPGGSLRLSCAASGFTLDYYSIGWFRQAPGKEREGVSCISSSDGSTYYADSVKGRFTISRDNSKNTLYLQMNSLRAEDTAVYYCATVKSCYVDGYILWGSWGQGTLVTVSS

SEQ ID NO: 122 - protein, 10 aa, Artificial Sequence
  Description of Artificial Sequence: Synthetic peptide
  alpha-LyPD3 h790 sdAb  sdCDR1
GFTLDYYSIG

SEQ ID NO: 123 - protein, 17 aa, Artificial Sequence
  Description of Artificial Sequence: Synthetic peptide
  alpha-LyPD3 h790 sdAb  sdCDR2
CISSSDGSTYYADSVKG

SEQ ID NO: 124 - protein, 14 aa, Artificial Sequence
  Description of Artificial Sequence: Synthetic peptide
  alpha-LyPD3 h790 sdAb  sdCDR3
VKSCYVDGYILWGS

SEQ ID NO: 125 - protein, 121 aa, Artificial Sequence
  Description of Artificial Sequence: Synthetic polypeptide
  alpha-LyPD3 H804 sdAb
QVQLLESGGGLVQPGGSLRLSCAASGFTLDYYAIGWFRQAPGKEHEGVSCISSSDGSTYYADSVKGRFTISRDNSKNTLYLQMNSLRAEDTAVYYCATVRSCASPYELGSWGQGTLVTVSS

SEQ ID NO: 126 - protein, 10 aa, Artificial Sequence
  Description of Artificial Sequence: Synthetic peptide
  alpha-LyPD3 H804 sdAb  sdCDR1
GFTLDYYAIG

SEQ ID NO: 127 - protein, 17 aa, Artificial Sequence
  Description of Artificial Sequence: Synthetic peptide
  alpha-LyPD3 H804 sdAb  sdCDR2
CISSSDGSTYYADSVKG

SEQ ID NO: 128 - protein, 12 aa, Artificial Sequence
  Description of Artificial Sequence: Synthetic peptide
  alpha-LyPD3 H804 sdAb  sdCDR3
VRSCASPYELGS

SEQ ID NO: 129 - protein, 124 aa, Artificial Sequence
  Description of Artificial Sequence: Synthetic polypeptide
  alpha-LyPD h773 sdAb (Pro929)
QVQLVESGGGLVQPGGSLRLSCAASGRSFSSYGMGWFRQAPGKEREIVAAISWGGSAVYYANSVKGRFTISRDNSKNTLYLQMNSLRAEDTAVYYCAANRQGRALVRKEFYDYWGQGTLVTVSS

SEQ ID NO: 130 - protein, 10 aa, Artificial Sequence
  Description of Artificial Sequence: Synthetic peptide
  alpha-LyPD h773 sdAb (Pro929) sdCDR1
GRSFSSYGMG

SEQ ID NO: 131 - protein, 17 aa, Artificial Sequence
  Description of Artificial Sequence: Synthetic peptide
  alpha-LyPD h773 sdAb (Pro929) sdCDR2
AISWGGSAVYYANSVKG

SEQ ID NO: 132 - protein, 15 aa, Artificial Sequence
  Description of Artificial Sequence: Synthetic peptide
  alpha-LyPD h773 sdAb (Pro929) sdCDR3
NRQGRALVRKEFYDY

SEQ ID NO: 133 - protein, 117 aa, Artificial Sequence
  Description of Artificial Sequence: Synthetic polypeptide
  alpha-LyPD3 h840 sdAb (Pro980)
QVQLLESGGGKVQPGGSLRLSCVVSGDTSSIYLMGWYRQTPGKQRELVAHIRGNGRTNYADSVKGRFTISRDNSKNTLYLQMNSLRAEDTAVYYCNVRNFWGSAEYWGQGTLVTVSS

SEQ ID NO: 134 - protein, 10 aa, Artificial Sequence
  Description of Artificial Sequence: Synthetic peptide
  alpha-LyPD3 h840 sdAb (Pro980) sdCDR1
GDTSSIYLMG

SEQ ID NO: 135 - protein, 16 aa, Artificial Sequence
  Description of Artificial Sequence: Synthetic peptide
  alpha-LyPD3 h840 sdAb (Pro980) sdCDR2
HIRGNGRTNYADSVKG

SEQ ID NO: 136 - protein, 9 aa, Artificial Sequence
  Description of Artificial Sequence: Synthetic peptide
  alpha-LyPD3 h840 sdAb (Pro980) sdCDR3
RNFWGSAEY

SEQ ID NO: 137 - protein, 124 aa, Artificial Sequence
  Description of Artificial Sequence: Synthetic polypeptide
  alpha-LyPD3 h885 sdAb (Pro981)
QVQLLESGGGLVQPGGSLRLSCVASRGTFSRYSMGWFRQAPGKEREFVGRISWSGDMTYYADSVKGRFTISRDNSKNTLYLQMNSLRAEDTAVYYCAASTLGYVWNHPNMYGYWGHGTLVTVSS

SEQ ID NO: 138 - protein, 10 aa, Artificial Sequence
  Description of Artificial Sequence: Synthetic peptide
  alpha-LyPD3 h885 sdAb (Pro981) sdCDR1
RGTFSRYSMG

SEQ ID NO: 139 - protein, 17 aa, Artificial Sequence
  Description of Artificial Sequence: Synthetic peptide
  alpha-LyPD3 h885 sdAb (Pro981) sdCDR2
RISWSGDMTYYADSVKG

SEQ ID NO: 140 - protein, 15 aa, Artificial Sequence
  Description of Artificial Sequence: Synthetic peptide
  alpha-LyPD3 h885 sdAb (Pro981) sdCDR3
STLGYVWNHPNMYGY

SEQ ID NO: 141 - protein, 118 aa, Artificial Sequence
  Description of Artificial Sequence: Synthetic polypeptide
  alpha-Her-2 1054 sdAb
QVQLQESGGGLVQAGGSLILSCAASGRTFSNYAMGWFRQAPGKEREFVAAINWSGTHTDYADSVKGRFTISRDNVKRTVYLQMNSLKPEDTATYFCSRGWSVFDPDYRGQGTQVTVSS

SEQ ID NO: 142 - protein, 10 aa, Artificial Sequence
  Description of Artificial Sequence: Synthetic peptide
  alpha-Her-2 1054 sdAb sdCDR1
GRTFSNYAMG

SEQ ID NO: 143 - protein, 17 aa, Artificial Sequence
  Description of Artificial Sequence: Synthetic peptide
  alpha-Her-2 1054 sdAb sdCDR2
AINWSGTHTDYADSVKG

SEQ ID NO: 144 - protein, 9 aa, Artificial Sequence
  Description of Artificial Sequence: Synthetic peptide
  alpha-Her-2 1054 sdAb sdCDR3
GWSVFDPDY

SEQ ID NO: 145 - protein, 118 aa, Artificial Sequence
  Description of Artificial Sequence: Synthetic polypeptide
  alpha-Her-2 1055 sdAb
QVQLQESGGGLVQPGGSLRLTCEVSGRAISSYAISWFRQAPGEEREFVAAINWSGTHTNYADSVKGRFTISRDNVKNTVYLQMNSLKPEDTATYFCSRGWSVFDPDYRGQGTQVTVSS

SEQ ID NO: 146 - protein, 10 aa, Artificial Sequence
  Description of Artificial Sequence: Synthetic peptide
  alpha-Her-2 1055 sdAb sdCDR1
GRAISSYAIS

SEQ ID NO: 147 - protein, 17 aa, Artificial Sequence
  Description of Artificial Sequence: Synthetic peptide
  alpha-Her-2 1055 sdAb sdCDR2
AINWSGTHTNYADSVKG

SEQ ID NO: 148 - protein, 10 aa, Artificial Sequence
  Description of Artificial Sequence: Synthetic peptide
  alpha-Her-2 1055 sdAb sdCDR3
GWSVFDPDYR

SEQ ID NO: 149 - protein, 118 aa, Artificial Sequence
  Description of Artificial Sequence: Synthetic polypeptide
  alpha-Her-2 1058 sdAb
QVQLQESGGGLVQPGGSLRLTCAASGRAISSYAISWFRQAPGEEREFVAAINWSGTHTNYADSVKGRFTISRDNVKNTVYLQMNSLKPEDTATYFCSRGWSVFDPDYRGQGTQVTVSS

SEQ ID NO: 150 - protein, 10 aa, Artificial Sequence
  Description of Artificial Sequence: Synthetic peptide
  alpha-Her-2 1058 sdAb sdCDR1
GRAISSYAIS

SEQ ID NO: 151 - protein, 17 aa, Artificial Sequence
  Description of Artificial Sequence: Synthetic peptide
  alpha-Her-2 1058 sdAb sdCDR2
AINWSGTHTNYADSVKG

SEQ ID NO: 152 - protein, 9 aa, Artificial Sequence
  Description of Artificial Sequence: Synthetic peptide
  alpha-Her-2 1058 sdAb sdCDR3
GWSVFDPDY

SEQ ID NO: 153 - protein, 118 aa, Artificial Sequence
  Description of Artificial Sequence: Synthetic polypeptide
  alpha-Her-2 1059 sdAb
QVQLQESGGGLVQPGGSLRLTCAASGRAISSYAISWFRQAPGEEREFVAAINWSGTHTDYADSVKGRFTISRDNAKNTVYLQMNSLKPEDTAVYFCSRGWSVFDPDYRGQGTQVTVSS

SEQ ID NO: 154 - protein, 10 aa, Artificial Sequence
  Description of Artificial Sequence: Synthetic peptide
  alpha-Her-2 1059 sdAb sdCDR1
GRAISSYAIS

SEQ ID NO: 155 - protein, 17 aa, Artificial Sequence
  Description of Artificial Sequence: Synthetic peptide
  alpha-Her-2 1059 sdAb sdCDR2
AINWSGTHTDYADSVKG

SEQ ID NO: 156 - protein, 9 aa, Artificial Sequence
  Description of Artificial Sequence: Synthetic peptide
  alpha-Her-2 1059 sdAb sdCDR3
GWSVFDPDY

SEQ ID NO: 157 - protein, 118 aa, Artificial Sequence
  Description of Artificial Sequence: Synthetic polypeptide
  alpha-Her-2 1065 sdAb
QVQLQESGGGLVQPGGSLRLTCEVSGRAISSYAISWFRQAPGEEREFVAAINWSGTHTNYADSVKGRFTISRDNVKRTVYLQMNSLKPEDTATYFCSRGWSVFDPDYRGQGTQVTVSS

SEQ ID NO: 158 - protein, 10 aa, Artificial Sequence
  Description of Artificial Sequence: Synthetic peptide
  alpha-Her-2 1065 sdAb sdCDR1
GRAISSYAIS

SEQ ID NO: 159 - protein, 17 aa, Artificial Sequence
  Description of Artificial Sequence: Synthetic peptide
  alpha-Her-2 1065 sdAb sdCDR2
AINWSGTHTNYADSVKG

SEQ ID NO: 160 - protein, 9 aa, Artificial Sequence
  Description of Artificial Sequence: Synthetic peptide
  alpha-Her-2 1065 sdAb sdCDR3
GWSVFDPDY

SEQ ID NO: 161 - protein, 118 aa, Artificial Sequence
  Description of Artificial Sequence: Synthetic polypeptide
  alpha-Her-2 1090 sdAb
QVQLQESGGGLVQTGGSLRLTCEVSGRAISSYAISWFRQAPGEEREFVAAINWSGTHTNYADSVKGRFTISRDNVKNTVYLQMNSLKPEDTATYFCSRGWSLFDPDYRGQGTQVTVSS

SEQ ID NO: 162 - protein, 10 aa, Artificial Sequence
  Description of Artificial Sequence: Synthetic peptide
  alpha-Her-2 1090 sdAb  sdCDR1
GRAISSYAIS

SEQ ID NO: 163 - protein, 17 aa, Artificial Sequence
  Description of Artificial Sequence: Synthetic peptide
  alpha-Her-2 1090 sdAb  sdCDR2
AINWSGTHTNYADSVKG

SEQ ID NO: 164 - protein, 9 aa, Artificial Sequence
  Description of Artificial Sequence: Synthetic peptide
  alpha-Her-2 1090 sdAb  sdCDR3
GWSLFDPDY

SEQ ID NO: 165 - protein, 121 aa, Artificial Sequence
  Description of Artificial Sequence: Synthetic polypeptide
  alpha-Her-2 1091 sdAb
QVQLQESGGGLVQPGGSLRLSCAASGFTFDDYAMSWVRQAPGKGLEWVSSINWSGTHTDYADSVKGRFTISRDNAKNTLYLQMNSLKSEDSAVYYCVKGWRLTGGYYDSVQGQGTQVTVSS

SEQ ID NO: 166 - protein, 10 aa, Artificial Sequence
  Description of Artificial Sequence: Synthetic peptide
  alpha-Her-2 1091 sdAb sdCDR1
GFTFDDYAMS

SEQ ID NO: 167 - protein, 17 aa, Artificial Sequence
  Description of Artificial Sequence: Synthetic peptide
  alpha-Her-2 1091 sdAb sdCDR2
SINWSGTHTDYADSVKG

SEQ ID NO: 168 - protein, 12 aa, Artificial Sequence
  Description of Artificial Sequence: Synthetic peptide
  alpha-Her-2 1091 sdAb sdCDR3
GWRLTGGYYDSV

SEQ ID NO: 169 - protein, 121 aa, Artificial Sequence
  Description of Artificial Sequence: Synthetic polypeptide
  alpha-Her-2 1092 sdAb
QVQLQESGGGLVQAGASLRLSCAASGFTFDDYALSWVRQAPGKGLEWVSSINWSGTHTDYADSVKGRFTISRDNAKNTLYLQMNSLKSEDSAVYYCVKGWRLTGGYYDSVQGQGTQVTVSS

SEQ ID NO: 170 - protein, 10 aa, Artificial Sequence
  Description of Artificial Sequence: Synthetic peptide
  alpha-Her-2 1092 sdAb  sdCDR1
GFTFDDYALS

SEQ ID NO: 171 - protein, 17 aa, Artificial Sequence
  Description of Artificial Sequence: Synthetic peptide
  alpha-Her-2 1092 sdAb  sdCDR2
SINWSGTHTDYADSVKG

SEQ ID NO: 172 - protein, 12 aa, Artificial Sequence
  Description of Artificial Sequence: Synthetic peptide
  alpha-Her-2 1092 sdAb  sdCDR3
GWRLTGGYYDSV

SEQ ID NO: 173 - protein, 121 aa, Artificial Sequence
  Description of Artificial Sequence: Synthetic polypeptide
  alpha-Her-2 1097 sdAb
QVQLQESGGGLVQPGGSLRLSCAASGFIFDDYAMTWVRQAPGKGLEWVSSINWSGTHTDYADSVKGRFTISRDNAKNTLYLQMNSLKSEDSAVYYCVKGWRHTDNYYAGVQGQGTQVTVSS

SEQ ID NO: 174 - protein, 10 aa, Artificial Sequence
  Description of Artificial Sequence: Synthetic peptide
  alpha-Her-2 1097 sdAb sdCDR1
GFIFDDYAMT

SEQ ID NO: 175 - protein, 17 aa, Artificial Sequence
  Description of Artificial Sequence: Synthetic peptide
  alpha-Her-2 1097 sdAb sdCDR2
SINWSGTHTDYADSVKG

SEQ ID NO: 176 - protein, 12 aa, Artificial Sequence
  Description of Artificial Sequence: Synthetic peptide
  alpha-Her-2 1097 sdAb sdCDR3
GWRHTDNYYAGV

SEQ ID NO: 177 - protein, 118 aa, Artificial Sequence
  Description of Artificial Sequence: Synthetic polypeptide
  alpha-Her-2 1118 sdAb
QVQLQESGGGLVQAGGSLRLSCAASGFTFDDYAMSWVRQTPGKGLEWVSSINWSGTHTNYADSVKGRFTISRDNAKKTLYLQMNSLKSEDTAVYYCARGWMVVPDSTRGQGTQVTVSS

SEQ ID NO: 178 - protein, 10 aa, Artificial Sequence
  Description of Artificial Sequence: Synthetic peptide
  alpha-Her-2 1118 sdAb sdCDR1
GFTFDDYAMS

SEQ ID NO: 179 - protein, 17 aa, Artificial Sequence
  Description of Artificial Sequence: Synthetic peptide
  alpha-Her-2 1118 sdAb sdCDR2
SINWSGTHTNYADSVKG

SEQ ID NO: 180 - protein, 9 aa, Artificial Sequence
  Description of Artificial Sequence: Synthetic peptide
  alpha-Her-2 1118 sdAb sdCDR3
GWMVVPDST

SEQ ID NO: 181 - protein, 118 aa, Artificial Sequence
  Description of Artificial Sequence: Synthetic polypeptide
  alpha-Her-2 1121 sdAb
QVQLQESGGGLVQAGGSLRLSCAASGFIFSDYAMTWVRQAPGKGLEWVSSINWSGTHTNYADSVKGRFTISRDNAKKTLYLQMNSLKSEDTAVYYCARGWMVVPDSTRGQGTQVTVSS

SEQ ID NO: 182 - protein, 10 aa, Artificial Sequence
  Description of Artificial Sequence: Synthetic peptide
  alpha-Her-2 1121 sdAb sdCDR1
GFIFSDYAMT

SEQ ID NO: 183 - protein, 17 aa, Artificial Sequence
  Description of Artificial Sequence: Synthetic peptide
  alpha-Her-2 1121 sdAb sdCDR2
SINWSGTHTNYADSVKG

SEQ ID NO: 184 - protein, 9 aa, Artificial Sequence
  Description of Artificial Sequence: Synthetic peptide
  alpha-Her-2 1121 sdAb sdCDR3
GWMVVPDST

SEQ ID NO: 185 - protein, 113 aa, Artificial Sequence
  Description of Artificial Sequence: Synthetic polypeptide
  alpha-Her-2 1134 sdAb
QVQLQESGGGLVQAGGSLRLSCAASGRIFSAAVMAWYRQPPGEQRELVASITHRGFTRYADSVKDRFTISRDNVNNTMYLQMNRLSPEDTAIYYCRLLNGDYWGQGTQVTVSS

SEQ ID NO: 186 - protein, 10 aa, Artificial Sequence
  Description of Artificial Sequence: Synthetic peptide
  alpha-Her-2 1134 sdAb sdCDR1
GRIFSAAVMA

SEQ ID NO: 187 - protein, 16 aa, Artificial Sequence
  Description of Artificial Sequence: Synthetic peptide
  alpha-Her-2 1134 sdAb sdCDR2
SITHRGFTRYADSVKD

SEQ ID NO: 188 - protein, 5 aa, Artificial Sequence
  Description of Artificial Sequence: Synthetic peptide
  alpha-Her-2 1134 sdAb sdCDR3
LNGDY

SEQ ID NO: 189 - protein, 118 aa, Artificial Sequence
  Description of Artificial Sequence: Synthetic polypeptide
  alpha-Her-2 1138 sdAb
QVQLQESGGGLVQPGGSLRLSCAASGFTFDDYAMSWVRQAPGKEMEWVSGINWSGTHTRYADSVKGRFTISRDNAKNTLDLQMNSLISEDTAVYYCARGFAADSRSTRGQGTQVTVSS

SEQ ID NO: 190 - protein, 10 aa, Artificial Sequence
  Description of Artificial Sequence: Synthetic peptide
  alpha-Her-2 1138 sdAb sdCDR1
GFTFDDYAMS

SEQ ID NO: 191 - protein, 17 aa, Artificial Sequence
  Description of Artificial Sequence: Synthetic peptide
  alpha-Her-2 1138 sdAb sdCDR2
GINWSGTHTRYADSVKG

SEQ ID NO: 192 - protein, 9 aa, Artificial Sequence
  Description of Artificial Sequence: Synthetic peptide
  alpha-Her-2 1138 sdAb sdCDR3
GFAADSRST

SEQ ID NO: 193 - protein, 118 aa, Artificial Sequence
  Description of Artificial Sequence: Synthetic polypeptide
  alpha-Her-2 1139 sdAb
QVQLQESGGGLVQPGGSLRLSCAASGFTFDDYAMSWIRQAPGKEMEWVSGINWSGTHTRYADSVKGRFTISRDNAKNTLDLQMNSLISEDTAVYYCARGFAADSRSTRGQGTQVTVSS

SEQ ID NO: 194 - protein, 10 aa, Artificial Sequence
  Description of Artificial Sequence: Synthetic peptide
  alpha-Her-2 1139 sdAb sdCDR1
GFTFDDYAMS

SEQ ID NO: 195 - protein, 17 aa, Artificial Sequence
  Description of Artificial Sequence: Synthetic peptide
  alpha-Her-2 1139 sdAb sdCDR2
GINWSGTHTRYADSVKG

SEQ ID NO: 196 - protein, 9 aa, Artificial Sequence
  Description of Artificial Sequence: Synthetic peptide
  alpha-Her-2 1139 sdAb sdCDR3
GFAADSRST

SEQ ID NO: 197 - protein, 118 aa, Artificial Sequence
  Description of Artificial Sequence: Synthetic polypeptide
  alpha-Her-2 1140 sdAb
QVQLQESGGGLVQPGGSLRLSCVASGFTFDDYAMSWVRQAPGKEMEWVSGINWSGTHTRYADSVKGRFTISRDNAKNTLDLQMNSLISEDTAVYYCARGFAADSRSTRGQGTQVTVSS

SEQ ID NO: 198 - protein, 10 aa, Artificial Sequence
  Description of Artificial Sequence: Synthetic peptide
  alpha-Her-2 1140 sdAb sdCDR1
GFTFDDYAMS

SEQ ID NO: 199 - protein, 17 aa, Artificial Sequence
  Description of Artificial Sequence: Synthetic peptide
  alpha-Her-2 1140 sdAb sdCDR2
GINWSGTHTRYADSVKG

SEQ ID NO: 200 - protein, 9 aa, Artificial Sequence
  Description of Artificial Sequence: Synthetic peptide
  alpha-Her-2 1140 sdAb sdCDR3
GFAADSRST

SEQ ID NO: 201 - protein, 125 aa, Artificial Sequence
  Description of Artificial Sequence: Synthetic polypeptide
  alpha-Her-2 1145 sdAb
QVQLQESGGGLVQAGGSLRLSCAASGRIFKNYPMGWFRQPPGKDREFVAAITSSGGTTHYRDSVKGRFTISRDNAKNTVYLQMNSLKPDDTAVYYCAGSSTPWDIPLGPNEVGYWGQGTQVTVSS

SEQ ID NO: 202 - protein, 10 aa, Artificial Sequence
  Description of Artificial Sequence: Synthetic peptide
  alpha-Her-2 1145 sdAb sdCDR1
GRIFKNYPMG

SEQ ID NO: 203 - protein, 17 aa, Artificial Sequence
  Description of Artificial Sequence: Synthetic peptide
  alpha-Her-2 1145 sdAb sdCDR2
AITSSGGTTHYRDSVKG

SEQ ID NO: 204 - protein, 16 aa, Artificial Sequence
  Description of Artificial Sequence: Synthetic peptide
  alpha-Her-2 1145 sdAb sdCDR3
SSTPWDIPLGPNEVGY

SEQ ID NO: 205 - protein, 125 aa, Artificial Sequence
  Description of Artificial Sequence: Synthetic polypeptide
  alpha-Her-2 1146 sdAb
QVQLQESGGGLVQAGGSLRLSCAASGRIFKNYPMGWFRQPPGKDREFVAAITSSGGTTPYRDSVKGRFTISRDNAKNTVYLQMNSLKPEDTAVYYCAGSSTPWDIPLGPNEVGFWGQGTQVTVSS

SEQ ID NO: 206 - protein, 10 aa, Artificial Sequence
  Description of Artificial Sequence: Synthetic peptide
  alpha-Her-2 1146 sdAb sdCDR1
GRIFKNYPMG

SEQ ID NO: 207 - protein, 17 aa, Artificial Sequence
  Description of Artificial Sequence: Synthetic peptide
  alpha-Her-2 1146 sdAb sdCDR2
AITSSGGTTPYRDSVKG

SEQ ID NO: 208 - protein, 16 aa, Artificial Sequence
  Description of Artificial Sequence: Synthetic peptide
  alpha-Her-2 1146 sdAb sdCDR3
SSTPWDIPLGPNEVGF

SEQ ID NO: 209 - protein, 115 aa, Artificial Sequence
  Description of Artificial Sequence: Synthetic polypeptide
  alpha-Her-2 1149 sdAb
QVQLQESGGGLVQAGGSLRLSCVASGNIFGFNVMGWYRQVPGKQRELVAISTGGRSTDYADSAKGRFTISRNNAKDTVYLQMNSLKPEDTAVYYCKMTMASSDYWGQGTQVTVSS

SEQ ID NO: 210 - protein, 10 aa, Artificial Sequence
  Description of Artificial Sequence: Synthetic peptide
  alpha-Her-2 1149 sdAb sdCDR1
GNIFGFNVMG

SEQ ID NO: 211 - protein, 16 aa, Artificial Sequence
  Description of Artificial Sequence: Synthetic peptide
  alpha-Her-2 1149 sdAb sdCDR2
ISTGGRSTDYADSAKG

SEQ ID NO: 212 - protein, 7 aa, Artificial Sequence
  Description of Artificial Sequence: Synthetic peptide
  alpha-Her-2 1149 sdAb sdCDR3
TMASSDY

SEQ ID NO: 213 - protein, 115 aa, Artificial Sequence
  Description of Artificial Sequence: Synthetic polypeptide
  alpha-Her-2 1150 sdAb
QVQLQESGGGLVQAGGSLRLSCVASGNIFGFNVMGWYRQVPGKQRELVAISTGGGSTNYADSAKGRFTVSRNNAKDTVYLQMNSLKPEDTAVYYCKMTMASVDYWGQGTQVTVSS

SEQ ID NO: 214 - protein, 10 aa, Artificial Sequence
  Description of Artificial Sequence: Synthetic peptide
  alpha-Her-2 1150 sdAb sdCDR1
GNIFGFNVMG

SEQ ID NO: 215 - protein, 16 aa, Artificial Sequence
  Description of Artificial Sequence: Synthetic peptide
  alpha-Her-2 1150 sdAb sdCDR2
ISTGGGSTNYADSAKG

SEQ ID NO: 216 - protein, 7 aa, Artificial Sequence
  Description of Artificial Sequence: Synthetic peptide
  alpha-Her-2 1150 sdAb sdCDR3
TMASVDY

SEQ ID NO: 217 - protein, 119 aa, Artificial Sequence
  Description of Artificial Sequence: Synthetic polypeptide
  alpha-Her-2 1156 sdAb
QVQLQESGGGLVQAGGSLKVSCAASRNIGSNYAVGWFRQAPGKEREPVAALRWTGSIIGYDDSLRGRFTISKDDAKNTVYLQMNSLKPEDTGVYYCAARILDRSSYDYWGQGTQVTVSS

SEQ ID NO: 218 - protein, 10 aa, Artificial Sequence
  Description of Artificial Sequence: Synthetic peptide
  alpha-Her-2 1156 sdAb sdCDR1
RNIGSNYAVG

SEQ ID NO: 219 - protein, 17 aa, Artificial Sequence
  Description of Artificial Sequence: Synthetic peptide
  alpha-Her-2 1156 sdAb sdCDR2
ALRWTGSIIGYDDSLRG

SEQ ID NO: 220 - protein, 10 aa, Artificial Sequence
  Description of Artificial Sequence: Synthetic peptide
  alpha-Her-2 1156 sdAb sdCDR3
RILDRSSYDY

SEQ ID NO: 221 - protein, 125 aa, Artificial Sequence
  Description of Artificial Sequence: Synthetic polypeptide
  alpha-Her-2 1158 sdAb
QVQLQESGGGLVQAGGSLRLSCTASGRTFSSYAMGWFRQAPEKEREFVAAITWSGGTTHYAESVKGRFTISRDNAKNTVYLQMNTLEPEDTAVYYCAARINYSTISSNEKMYHYWGQGTQVTVSS

SEQ ID NO: 222 - protein, 10 aa, Artificial Sequence
  Description of Artificial Sequence: Synthetic peptide
  alpha-Her-2 1158 sdAb sdCDR1
GRTFSSYAMG

SEQ ID NO: 223 - protein, 17 aa, Artificial Sequence
  Description of Artificial Sequence: Synthetic peptide
  alpha-Her-2 1158 sdAb sdCDR2
AITWSGGTTHYAESVKG

SEQ ID NO: 224 - protein, 16 aa, Artificial Sequence
  Description of Artificial Sequence: Synthetic peptide
  alpha-Her-2 1158 sdAb sdCDR3
RINYSTISSNEKMYHY

SEQ ID NO: 225 - protein, 123 aa, Artificial Sequence
  Description of Artificial Sequence: Synthetic polypeptide
  alpha-Her-2 1159 sdAb
QVQLQESGGGLVQAGGSLRLSCATSGRTFSSLAMGWFRQAPGKERELVAGISWSGSTTYYADSVKGRFAISRDNAKNTVYLQMNSLKPEDTAVYYCAARTSSIATIGREYDYWGQGTQVTVSS

SEQ ID NO: 226 - protein, 10 aa, Artificial Sequence
  Description of Artificial Sequence: Synthetic peptide
  alpha-Her-2 1159 sdAb sdCDR1
GRTFSSLAMG

SEQ ID NO: 227 - protein, 17 aa, Artificial Sequence
  Description of Artificial Sequence: Synthetic peptide
  alpha-Her-2 1159 sdAb sdCDR2
GISWSGSTTYYADSVKG

SEQ ID NO: 228 - protein, 14 aa, Artificial Sequence
  Description of Artificial Sequence: Synthetic peptide
  alpha-Her-2 1159 sdAb sdCDR3
RTSSIATIGREYDY

SEQ ID NO: 229 - protein, 119 aa, Artificial Sequence
  Description of Artificial Sequence: Synthetic polypeptide
  alpha-Her-2 1160 sdAb
QVQLQESGGGLVQAGGSLRLSCAASGRTFSNERLGWFRQAPGKERELVAAIRWSGVIIGYADSVRGRFTISRDNAKSTVYLQMNSLRPEDTAVYFCAADRGVYGTWDYWGQGTQVTVSS

SEQ ID NO: 230 - protein, 10 aa, Artificial Sequence
  Description of Artificial Sequence: Synthetic peptide
  alpha-Her-2 1160 sdAb sdCDR1
GRTFSNERLG

SEQ ID NO: 231 - protein, 17 aa, Artificial Sequence
  Description of Artificial Sequence: Synthetic peptide
  alpha-Her-2 1160 sdAb sdCDR2
AIRWSGVIIGYADSVRG

SEQ ID NO: 232 - protein, 10 aa, Artificial Sequence
  Description of Artificial Sequence: Synthetic peptide
  alpha-Her-2 1160 sdAb sdCDR3
DRGVYGTWDY

SEQ ID NO: 233 - protein, 113 aa, Artificial Sequence
  Description of Artificial Sequence: Synthetic polypeptide
  alpha-Her-2 1161 sdAb
QVQLQESGGGLVQPGKSLRLSCAVSGDIFGTYGMAWYRQAPGKQREPVASISIGGIINYADSVKGRFTISRDNVKNTVYLQMNSLKPEDTAVYYCKLLDWNYWGRGTQVTVSS

SEQ ID NO: 234 - protein, 10 aa, Artificial Sequence
  Description of Artificial Sequence: Synthetic peptide
  alpha-Her-2 1161 sdAb sdCDR1
GDIFGTYGMA

SEQ ID NO: 235 - protein, 16 aa, Artificial Sequence
  Description of Artificial Sequence: Synthetic peptide
  alpha-Her-2 1161 sdAb sdCDR2
SISIGGIINYADSVKG

SEQ ID NO: 236 - protein, 5 aa, Artificial Sequence
  Description of Artificial Sequence: Synthetic peptide
  alpha-Her-2 1161 sdAb sdCDR3
LDWNY

SEQ ID NO: 237 - protein, 127 aa, Artificial Sequence
  Description of Artificial Sequence: Synthetic polypeptide
  alpha-Her-2 1162 sdAb
QVQLQESGGGLVQAGGSLRLSCAASGRPFSGNAMGWFRQAPGKEREFVAAISWSGDSTYYADSVKGRFTISRDNDENTAYLQMNSLKPEDTAVYYCAATRSFYSRTYYTRPSDYNYWGPGTQVTVSS

SEQ ID NO: 238 - protein, 10 aa, Artificial Sequence
  Description of Artificial Sequence: Synthetic peptide
  alpha-Her-2 1162 sdAb sdCDR1
GRPFSGNAMG

SEQ ID NO: 239 - protein, 17 aa, Artificial Sequence
  Description of Artificial Sequence: Synthetic peptide
  alpha-Her-2 1162 sdAb sdCDR2
AISWSGDSTYYADSVKG

SEQ ID NO: 240 - protein, 18 aa, Artificial Sequence
  Description of Artificial Sequence: Synthetic peptide
  alpha-Her-2 1162 sdAb sdCDR3
TRSFYSRTYYTRPSDYNY

SEQ ID NO: 241 - protein, 125 aa, Artificial Sequence
  Description of Artificial Sequence: Synthetic polypeptide
  alpha-Her-2 1163 sdAb
QVQLQESGGGLVQAGGSLRLSCAASGRRFNNYFMGWFRQAPGKEREFVALLRESGDNTYYTNSVKGRFTISRDNARNTVYLQMNSLKPEDTAVYYCAARLDTGFVLYSANSYAYWGQGTQVTVSS

SEQ ID NO: 242 - protein, 10 aa, Artificial Sequence
  Description of Artificial Sequence: Synthetic peptide
  alpha-Her-2 1163 sdAb sdCDR1
GRRFNNYFMG

SEQ ID NO: 243 - protein, 17 aa, Artificial Sequence
  Description of Artificial Sequence: Synthetic peptide
  alpha-Her-2 1163 sdAb sdCDR2
LLRESGDNTYYTNSVKG

SEQ ID NO: 244 - protein, 16 aa, Artificial Sequence
  Description of Artificial Sequence: Synthetic peptide
  alpha-Her-2 1163 sdAb sdCDR3
RLDTGFVLYSANSYAY

SEQ ID NO: 245 - protein, 115 aa, Artificial Sequence
  Description of Artificial Sequence: Synthetic polypeptide
  alpha-HSA half-life extension domain (aHSA (10GE))
EVQLVESGGGLVQPGNSLRLSCAASGFTFSKFGMSWVRQAPGKGLEWVSSISGSGRDTLYAESVKGRFTISRDNAKTTLYLQMNSLRPEDTAVYYCTIGGSLSVSSQGTLVTVSS

SEQ ID NO: 246 - protein, 10 aa, Artificial Sequence
  Description of Artificial Sequence: Synthetic peptide
  alpha-HSA half-life extension domain (aHSA (10GE)) sdCDR1
GFTFSKFGMS

SEQ ID NO: 247 - protein, 17 aa, Artificial Sequence
  Description of Artificial Sequence: Synthetic peptide
  alpha-HSA half-life extension domain (aHSA (10GE)) sdCDR2
SISGSGRDTLYAESVKG

SEQ ID NO: 248 - protein, 6 aa, Artificial Sequence
  Description of Artificial Sequence: Synthetic peptide
  alpha-HSA half-life extension domain (aHSA (10GE)) sdCDR3
GGSLSV

SEQ ID NO: 249 - protein, 121 aa, Artificial Sequence
  Description of Artificial Sequence: Synthetic polypeptide
  alpha-HSA half-life extension domain with His tag
EVQLVESGGGLVQPGNSLRLSCAASGFTFSKFGMSWVRQAPGKGLEWVSSISGSGRDTLYAESVKGRFTISRDNAKTTLYLQMNSLRPEDTAVYYCTIGGSLSVSSQGTLVTVSSHHHHHH

SEQ ID NO: 250 - protein, 10 aa, Artificial Sequence
  Description of Artificial Sequence: Synthetic peptide
  alpha-HSA half-life extension domain with His tag sdCDR1
GFTFSKFGMS

SEQ ID NO: 251 - protein, 17 aa, Artificial Sequence
  Description of Artificial Sequence: Synthetic peptide
  alpha-HSA half-life extension domain with His tag sdCDR2
SISGSGRDTLYAESVKG

SEQ ID NO: 252 - protein, 6 aa, Artificial Sequence
  Description of Artificial Sequence: Synthetic peptide
  alpha-HSA half-life extension domain with His tag sdCDR3
GGSLSV

SEQ ID NO: 253 - skipped

SEQ ID NO: 254 - protein, 109 aa, Artificial Sequence
  Description of Artificial Sequence: Synthetic polypeptide
  alpha-CD3 VL
QTVVTQEPSLTVSPGGTVTLTCASSTGAVTSGNYPNWVQQKPGQAPRGLIGGTKFLVPGTPARFSGSLLGGKAALTLSGVQPEDEAEYYCTLWYSNRWVFGGGTKLTVL

SEQ ID NO: 255 - protein, 14 aa, Artificial Sequence
  Description of Artificial Sequence: Synthetic peptide
  alpha-CD3 VL aVLCDR1
ASSTGAVTSGNYPN

SEQ ID NO: 256 - protein, 7 aa, Artificial Sequence
  Description of Artificial Sequence: Synthetic peptide
  alpha-CD3 VL aVL sdCDR2
GTKFLVP

SEQ ID NO: 257 - protein, 9 aa, Artificial Sequence
  Description of Artificial Sequence: Synthetic peptide
  alpha-CD3 VL aVL sdCDR3
TLWYSNRWV

SEQ ID NO: 258 - protein, 110 aa, Artificial Sequence
  Description of Artificial Sequence: Synthetic polypeptide
  alpha-CD3 VLi
QTVVTQEPSLTVSPGGTVTLTCGSSTGAVTSGNYPNWVQQKPGQAPRGLIGDYKDDDDKGTPARFSGSLLGGKAALTLSGVQPEDEAEYYCVLWYSNRWVFGGGTKLTVL

SEQ ID NO: 259 - protein, 14 aa, Artificial Sequence
  Description of Artificial Sequence: Synthetic peptide
  alpha-CD3 VLi iVLCDR1
GSSTGAVTSGNYPN

SEQ ID NO: 260 - protein, 8 aa, Artificial Sequence
  Description of Artificial Sequence: Synthetic peptide
  alpha-CD3 VLi iVL sdCDR2
DYKDDDDK

SEQ ID NO: 261 - protein, 9 aa, Artificial Sequence
  Description of Artificial Sequence: Synthetic peptide
  alpha-CD3 VLi iVL sdCDR3
VLWYSNRWV

SEQ ID NO: 262 - protein, 109 aa, Artificial Sequence
  Description of Artificial Sequence: Synthetic polypeptide
  alpha-CD3 VLi2
QTVVTQEPSLTVSPGGTVTLTCGSSTGAVTSGNYPNWVQQKPGQAPRGLIGGTKDDAPGTPARFSGSLLGGKAALTLSGVQPEDEAEYYCVLWYSNRWVFGGGTKLTVL

SEQ ID NO: 263 - protein, 14 aa, Artificial Sequence
  Description of Artificial Sequence: Synthetic peptide
  alpha-CD3 VLi2 iVLCDR1
GSSTGAVTSGNYPN

SEQ ID NO: 264 - protein, 7 aa, Artificial Sequence
  Description of Artificial Sequence: Synthetic peptide
  alpha-CD3 VLi2 iVL sdCDR2
GTKDDAP

SEQ ID NO: 265 - protein, 9 aa, Artificial Sequence
  Description of Artificial Sequence: Synthetic peptide
  alpha-CD3 VLi2 iVL sdCDR3
VLWYSNRWV

SEQ ID NO: 266 - protein, 109 aa, Artificial Sequence
  Description of Artificial Sequence: Synthetic polypeptide
  alpha-CD3 VLiGL
QTVVTQEPSLTVSPGGTVTLTCGSSTGAVTSGHYPNWVQQKPGQAPRGLIGGTSNKHSWTPARFSGSLLGGKAALTLSGVQPEDEAEYYCVLWGSRRWVFGGGTKLTVL

SEQ ID NO: 267 - protein, 14 aa, Artificial Sequence
  Description of Artificial Sequence: Synthetic peptide
  alpha-CD3 VLiGL aVLiGLCDR1
GSSTGAVTSGHYPN

SEQ ID NO: 268 - protein, 7 aa, Artificial Sequence
  Description of Artificial Sequence: Synthetic peptide
  alpha-CD3 VLiGL aVLiGLCDR2
GTSNKHS

SEQ ID NO: 269 - protein, 9 aa, Artificial Sequence
  Description of Artificial Sequence: Synthetic peptide
  alpha-CD3 VLiGL aVLiGLCDR3
VLWGSRRWV

SEQ ID NO: 270 - protein, 125 aa, Artificial Sequence
  Description of Artificial Sequence: Synthetic polypeptide
  alpha-CD3 VH
EVQLVESGGGLVQPGGSLKLSCAASGFTFNKYAINWVRQAPGKGLEWVARIRSKYNNYATYYADQVKDRFTISRDDSKNTAYLQMNNLKTEDTAVYYCVRHANFGNSYISYWAYWGQGTLVTVSS

SEQ ID NO: 271 - protein, 10 aa, Artificial Sequence
  Description of Artificial Sequence: Synthetic peptide
  alpha-CD3 VH aVHCDR1
GFTFNKYAIN

SEQ ID NO: 272 - protein, 19 aa, Artificial Sequence
  Description of Artificial Sequence: Synthetic peptide
  alpha-CD3 VH aVH sdCDR2
RIRSKYNNYATYYADQVKD

SEQ ID NO: 273 - protein, 14 aa, Artificial Sequence
  Description of Artificial Sequence: Synthetic peptide
  alpha-CD3 VH aVH sdCDR3
HANFGNSYISYWAY

SEQ ID NO: 274 - protein, 126 aa, Artificial Sequence
  Description of Artificial Sequence: Synthetic polypeptide
  alpha-CD3 VHi
EVQLVESGGGLVQPGGSLKLSCAASGFTFNKYAMNWVRQAPGKGLEWVARIRSKYDYKDDDDKADSVKDRFTISRDDSKNTAYLQMNNLKTEDTAVYYCVRHGNFGNSYISYWAYWGQGTLVTVSS

SEQ ID NO: 275 - protein, 10 aa, Artificial Sequence
  Description of Artificial Sequence: Synthetic peptide
  alpha-CD3 VHi iVH sdCDR1
GFTFNKYAMN

SEQ ID NO: 276 - protein, 20 aa, Artificial Sequence
  Description of Artificial Sequence: Synthetic peptide
  alpha-CD3 VHi iVH sdCDR2
RIRSKYDYKDDDDKADSVKD

SEQ ID NO: 277 - protein, 14 aa, Artificial Sequence
  Description of Artificial Sequence: Synthetic peptide
  alpha-CD3 VHi2 iVH sdCDR3
HGNFGNSYISYWAY

SEQ ID NO: 278 - protein, 125 aa, Artificial Sequence
  Description of Artificial Sequence: Synthetic polypeptide
  alpha-CD3 VHi2
EVQLVESGGGLVQPGGSLKLSCAASGFTFNKHAMNWVRQAPGKGLEWVARIRSKYNNYATAYADSVKDRFTISRDDSKNTAYLQMNNLKTEDTAVYYCVRHGNFGNSYISYWAYWGQGTLVTVSS

SEQ ID NO: 279 - protein, 10 aa, Artificial Sequence
  Description of Artificial Sequence: Synthetic peptide
  alpha-CD3 VHi2 iVH sdCDR1
GFTFNKHAMN

SEQ ID NO: 280 - protein, 19 aa, Artificial Sequence
  Description of Artificial Sequence: Synthetic peptide
  alpha-CD3 VHi2 iVH sdCDR2
RIRSKYNNYATAYADSVKD

SEQ ID NO: 281 - protein, 14 aa, Artificial Sequence
  Description of Artificial Sequence: Synthetic peptide
  alpha-CD3 VHi2 iVH sdCDR3
HGNFGNSYISYWAY

SEQ ID NO: 282 - protein, 125 aa, Artificial Sequence
  Description of Artificial Sequence: Synthetic polypeptide
  alpha-CD3 VHiGL4
EVQLVESGGGLVQPGGSLKLSCAASGFTFSGYAMNWVRQAPGKGLEWVARIRSKANSYATEYAASVKDRFTISRDDSKNTAYLQMNNLKTEDTAVYYCVRHGNAGNSAISYWAYWGQGTLVTVSS

SEQ ID NO: 283 - protein, 10 aa, Artificial Sequence
  Description of Artificial Sequence: Synthetic peptide
  alpha-CD3 VHiGL4 aVHiGL4CDR1
GFTFSGYAMN

SEQ ID NO: 284 - protein, 19 aa, Artificial Sequence
  Description of Artificial Sequence: Synthetic peptide
  alpha-CD3 VHiGL4 aVHiGL4CDR2
RIRSKANSYATEYAASVKD

SEQ ID NO: 285 - protein, 14 aa, Artificial Sequence
  Description of Artificial Sequence: Synthetic peptide
  alpha-CD3 VHiGL4 aVHiGL4CDR3
HGNAGNSAISYWAY

SEQ ID NO: 286 - protein, 15 aa, Artificial Sequence
  Description of Artificial Sequence: Synthetic peptide
  Normal/Non-cleavable linker
GGGGSGGGGSGGGGS

SEQ ID NO: 287 - protein, 8 aa, Artificial Sequence
  Description of Artificial Sequence: Synthetic peptide
  Constrained linker
GGGSGGGS

SEQ ID NO: 288 - protein, 899 aa, Artificial Sequence
  Description of Artificial Sequence: Synthetic polypeptide
  Pro565
QVQLLESGGGLVQPGGSLRLSCAASGRTLDNYDMGWFRQGPGKEREFVAAISWSGGSTDYAYSVKGRFTISRDNSKNTLYLQMNSLRAEDTAVYYCAADLRFTGGDTMTPETYDYWGQGTLVTVSSGGGSGGGSEVQLVESGGGLVQPGGSLKLSCAASGFTFNKYAINWVRQAPGKGLEWVARIRSKYNNYATYYADQVKDRFTISRDDSKNTAYLQMNNLKTEDTAVYYCVRHANFGNSYISYWAYWGQGTLVTVSSGGGSGGGSQTVVTQEPSLTVSPGGTVTLTCASSTGAVTSGNYPNWVQQKPGQAPRGLIGGTKFLVPGTPARFSGSLLGGKAALTLSGVQPEDEAEYYCTLWYSNRWVFGGGTKLTVLGGGSGGGSQVQLLESGGGLVQPGGSLRLSCAASGRTLDNYDMGWFRQGPGKEREFVAAISWSGGSTDYAYSVKGRFTISRDNSKNTLYLQMNSLRAEDTAVYYCAADLRFTGGDTMTPETYDYWGQGTLVTVSSSGGPGPAGMKGLPGSQTVVTQEPSLTVSPGGTVTLTCGSSTGAVTSGNYPNWVQQKPGQAPRGLIGDYKDDDDKGTPARFSGSLLGGKAALTLSGVQPEDEAEYYCVLWYSNRWVFGGGTKLTVLGGGSGGGSEVQLVESGGGLVQPGGSLKLSCAASGFTFNKYAMNWVRQAPGKGLEWVARIRSKYDYKDDDDKADSVKDRFTISRDDSKNTAYLQMNNLKTEDTAVYYCVRHGNFGNSYISYWAYWGQGTLVTVSSGGGGSGGGSEVQLVESGGGLVQPGNSLRLSCAASGFTFSKFGMSWVRQAPGKGLEWVSSISGSGRDTLYAESVKGRFTISRDNAKTTLYLQMNSLRPEDTAVYYCTIGGSLSVSSQGTLVTVSSHHHHHH

SEQ ID NO: 289 - protein, 899 aa, Artificial Sequence
  Description of Artificial Sequence: Synthetic polypeptide
  Pro566
QVQLLESGGGLVQPGGSLRLSCAASGRTFSDYDMGWFRQGPGKEREFVAAISWSGGHTNYADSVKGRFTISRDNSKNTLYLQMNSLRAEDTAVYYCAADLRFTGGDTTTPETYDYWGQGTLVTVSSGGGSGGGSEVQLVESGGGLVQPGGSLKLSCAASGFTFNKYAINWVRQAPGKGLEWVARIRSKYNNYATYYADQVKDRFTISRDDSKNTAYLQMNNLKTEDTAVYYCVRHANFGNSYISYWAYWGQGTLVTVSSGGGSGGGSQTVVTQEPSLTVSPGGTVTLTCASSTGAVTSGNYPNWVQQKPGQAPRGLIGGTKFLVPGTPARFSGSLLGGKAALTLSGVQPEDEAEYYCTLWYSNRWVFGGGTKLTVLGGGSGGGSQVQLLESGGGLVQPGGSLRLSCAASGRTFSDYDMGWFRQGPGKEREFVAAISWSGGHTNYADSVKGRFTISRDNSKNTLYLQMNSLRAEDTAVYYCAADLRFTGGDTTTPETYDYWGQGTLVTVSSSGGPGPAGMKGLPGSQTVVTQEPSLTVSPGGTVTLTCGSSTGAVTSGNYPNWVQQKPGQAPRGLIGDYKDDDDKGTPARFSGSLLGGKAALTLSGVQPEDEAEYYCVLWYSNRWVFGGGTKLTVLGGGSGGGSEVQLVESGGGLVQPGGSLKLSCAASGFTFNKYAMNWVRQAPGKGLEWVARIRSKYDYKDDDDKADSVKDRFTISRDDSKNTAYLQMNNLKTEDTAVYYCVRHGNFGNSYISYWAYWGQGTLVTVSSGGGGSGGGSEVQLVESGGGLVQPGNSLRLSCAASGFTFSKFGMSWVRQAPGKGLEWVSSISGSGRDTLYAESVKGRFTISRDNAKTTLYLQMNSLRPEDTAVYYCTIGGSLSVSSQGTLVTVSSHHHHHH

SEQ ID NO: 290 - protein, 899 aa, Artificial Sequence
  Description of Artificial Sequence: Synthetic polypeptide
  Pro567
QVQLVESGGGLVQPGRSLRLSCAASGRTLDNYDMGWFRQGPGKEREFVAAISWSGGSTDYAYSVTGRFTISRDNAKNSLYLQMNSLRAEDTALYYCAADLRFTGGDTMTPETYDYWGQGTLVTVSSGGGSGGGSEVQLVESGGGLVQPGGSLKLSCAASGFTFNKYAINWVRQAPGKGLEWVARIRSKYNNYATYYADQVKDRFTISRDDSKNTAYLQMNNLKTEDTAVYYCVRHANFGNSYISYWAYWGQGTLVTVSSGGGSGGGSQTVVTQEPSLTVSPGGTVTLTCASSTGAVTSGNYPNWVQQKPGQAPRGLIGGTKFLVPGTPARFSGSLLGGKAALTLSGVQPEDEAEYYCTLWYSNRWVFGGGTKLTVLGGGSGGGSQVQLVESGGGLVQPGRSLRLSCAASGRTLDNYDMGWFRQGPGKEREFVAAISWSGGSTDYAYSVTGRFTISRDNAKNSLYLQMNSLRAEDTALYYCAADLRFTGGDTMTPETYDYWGQGTLVTVSSSGGPGPAGMKGLPGSQTVVTQEPSLTVSPGGTVTLTCGSSTGAVTSGNYPNWVQQKPGQAPRGLIGDYKDDDDKGTPARFSGSLLGGKAALTLSGVQPEDEAEYYCVLWYSNRWVFGGGTKLTVLGGGSGGGSEVQLVESGGGLVQPGGSLKLSCAASGFTFNKYAMNWVRQAPGKGLEWVARIRSKYDYKDDDDKADSVKDRFTISRDDSKNTAYLQMNNLKTEDTAVYYCVRHGNFGNSYISYWAYWGQGTLVTVSSGGGGSGGGSEVQLVESGGGLVQPGNSLRLSCAASGFTFSKFGMSWVRQAPGKGLEWVSSISGSGRDTLYAESVKGRFTISRDNAKTTLYLQMNSLRPEDTAVYYCTIGGSLSVSSQGTLVTVSSHHHHHH

SEQ ID NO: 291 - protein, 899 aa, Artificial Sequence
  Description of Artificial Sequence: Synthetic polypeptide
  Pro568
QVQLLESGGGLVQPGGSLRLSCAASGRTLDNYDMGWFRQGPGKEREFVAAISWSGGSTDYAYSVKGRFTISRDNSKNTLYLQMNSLRAEDTAVYYCAADLRFTGGDTMTPETYDYWGQGTLVTVSSGGGSGGGSEVQLVESGGGLVQPGGSLKLSCAASGFTFNKYAINWVRQAPGKGLEWVARIRSKYNNYATYYADQVKDRFTISRDDSKNTAYLQMNNLKTEDTAVYYCVRHANFGNSYISYWAYWGQGTLVTVSSGGGSGGGSQTVVTQEPSLTVSPGGTVTLTCASSTGAVTSGNYPNWVQQKPGQAPRGLIGGTKFLVPGTPARFSGSLLGGKAALTLSGVQPEDEAEYYCTLWYSNRWVFGGGTKLTVLGGGSGGGSQVQLLESGGGLVQPGGSLRLSCAASGRTLDNYDMGWFRQGPGKEREFVAAISWSGGSTDYAYSVKGRFTISRDNSKNTLYLQMNSLRAEDTAVYYCAADLRFTGGDTMTPETYDYWGQGTLVTVSSGGGGSGGGGSGGGGSQTVVTQEPSLTVSPGGTVTLTCGSSTGAVTSGNYPNWVQQKPGQAPRGLIGDYKDDDDKGTPARFSGSLLGGKAALTLSGVQPEDEAEYYCVLWYSNRWVFGGGTKLTVLGGGSGGGSEVQLVESGGGLVQPGGSLKLSCAASGFTFNKYAMNWVRQAPGKGLEWVARIRSKYDYKDDDDKADSVKDRFTISRDDSKNTAYLQMNNLKTEDTAVYYCVRHGNFGNSYISYWAYWGQGTLVTVSSGGGGSGGGSEVQLVESGGGLVQPGNSLRLSCAASGFTFSKFGMSWVRQAPGKGLEWVSSISGSGRDTLYAESVKGRFTISRDNAKTTLYLQMNSLRPEDTAVYYCTIGGSLSVSSQGTLVTVSSHHHHHH

SEQ ID NO: 292 - protein, 899 aa, Artificial Sequence
  Description of Artificial Sequence: Synthetic polypeptide
  Pro727
QVQLLESGGGLVQPGGSLRLSCAASGRTLDNYDMGWFRQGPGKEREFVAAISWSGGSTDYAYSVKGRFTISRDNSKNTLYLQMNSLRAEDTAVYYCAADLRFTGGDTMTPETYDYWGQGTLVTVSSGGGSGGGSEVQLVESGGGLVQPGGSLKLSCAASGFTFNKYAINWVRQAPGKGLEWVARIRSKYNNYATYYADQVKDRFTISRDDSKNTAYLQMNNLKTEDTAVYYCVRHANFGNSYISYWAYWGQGTLVTVSSGGGSGGGSQTVVTQEPSLTVSPGGTVTLTCASSTGAVTSGNYPNWVQQKPGQAPRGLIGGTKFLVPGTPARFSGSLLGGKAALTLSGVQPEDEAEYYCTLWYSNRWVFGGGTKLTVLGGGSGGGSQVQLLESGGGLVQPGGSLRLSCAASGRTLDNYDMGWFRQGPGKEREFVAAISWSGGSTDYAYSVKGRFTISRDNSKNTLYLQMNSLRAEDTAVYYCAADLRFTGGDTMTPETYDYWGQGTLVTVSSSGGGKKLADEPEGGSQTVVTQEPSLTVSPGGTVTLTCGSSTGAVTSGNYPNWVQQKPGQAPRGLIGDYKDDDDKGTPARFSGSLLGGKAALTLSGVQPEDEAEYYCVLWYSNRWVFGGGTKLTVLGGGSGGGSEVQLVESGGGLVQPGGSLKLSCAASGFTFNKYAMNWVRQAPGKGLEWVARIRSKYDYKDDDDKADSVKDRFTISRDDSKNTAYLQMNNLKTEDTAVYYCVRHGNFGNSYISYWAYWGQGTLVTVSSGGGGSGGGSEVQLVESGGGLVQPGNSLRLSCAASGFTFSKFGMSWVRQAPGKGLEWVSSISGSGRDTLYAESVKGRFTISRDNAKTTLYLQMNSLRPEDTAVYYCTIGGSLSVSSQGTLVTVSSHHHHHH

SEQ ID NO: 293 - protein, 901 aa, Artificial Sequence
  Description of Artificial Sequence: Synthetic polypeptide
  Pro728
QVQLLESGGGLVQPGGSLRLSCAASGRTLDNYDMGWFRQGPGKEREFVAAISWSGGSTDYAYSVKGRFTISRDNSKNTLYLQMNSLRAEDTAVYYCAADLRFTGGDTMTPETYDYWGQGTLVTVSSGGGSGGGSEVQLVESGGGLVQPGGSLKLSCAASGFTFNKYAINWVRQAPGKGLEWVARIRSKYNNYATYYADQVKDRFTISRDDSKNTAYLQMNNLKTEDTAVYYCVRHANFGNSYISYWAYWGQGTLVTVSSGGGSGGGSQTVVTQEPSLTVSPGGTVTLTCASSTGAVTSGNYPNWVQQKPGQAPRGLIGGTKFLVPGTPARFSGSLLGGKAALTLSGVQPEDEAEYYCTLWYSNRWVFGGGTKLTVLGGGSGGGSQVQLLESGGGLVQPGGSLRLSCAASGRTLDNYDMGWFRQGPGKEREFVAAISWSGGSTDYAYSVKGRFTISRDNSKNTLYLQMNSLRAEDTAVYYCAADLRFTGGDTMTPETYDYWGQGTLVTVSSGSGGPGPAGMHGLPGGSQTVVTQEPSLTVSPGGTVTLTCGSSTGAVTSGNYPNWVQQKPGQAPRGLIGDYKDDDDKGTPARFSGSLLGGKAALTLSGVQPEDEAEYYCVLWYSNRWVFGGGTKLTVLGGGSGGGSEVQLVESGGGLVQPGGSLKLSCAASGFTFNKYAMNWVRQAPGKGLEWVARIRSKYDYKDDDDKADSVKDRFTISRDDSKNTAYLQMNNLKTEDTAVYYCVRHGNFGNSYISYWAYWGQGTLVTVSSGGGGSGGGSEVQLVESGGGLVQPGNSLRLSCAASGFTFSKFGMSWVRQAPGKGLEWVSSISGSGRDTLYAESVKGRFTISRDNAKTTLYLQMNSLRPEDTAVYYCTIGGSLSVSSQGTLVTVSSHHHHHH

SEQ ID NO: 294 - protein, 900 aa, Artificial Sequence
  Description of Artificial Sequence: Synthetic polypeptide
  Pro729
QVQLLESGGGLVQPGGSLRLSCAASGRTLDNYDMGWFRQGPGKEREFVAAISWSGGSTDYAYSVKGRFTISRDNSKNTLYLQMNSLRAEDTAVYYCAADLRFTGGDTMTPETYDYWGQGTLVTVSSGGGSGGGSEVQLVESGGGLVQPGGSLKLSCAASGFTFNKYAINWVRQAPGKGLEWVARIRSKYNNYATYYADQVKDRFTISRDDSKNTAYLQMNNLKTEDTAVYYCVRHANFGNSYISYWAYWGQGTLVTVSSGGGSGGGSQTVVTQEPSLTVSPGGTVTLTCASSTGAVTSGNYPNWVQQKPGQAPRGLIGGTKFLVPGTPARFSGSLLGGKAALTLSGVQPEDEAEYYCTLWYSNRWVFGGGTKLTVLGGGSGGGSQVQLLESGGGLVQPGGSLRLSCAASGRTLDNYDMGWFRQGPGKEREFVAAISWSGGSTDYAYSVKGRFTISRDNSKNTLYLQMNSLRAEDTAVYYCAADLRFTGGDTMTPETYDYWGQGTLVTVSSGGGSARLQSAAPGGGSQTVVTQEPSLTVSPGGTVTLTCGSSTGAVTSGNYPNWVQQKPGQAPRGLIGDYKDDDDKGTPARFSGSLLGGKAALTLSGVQPEDEAEYYCVLWYSNRWVFGGGTKLTVLGGGSGGGSEVQLVESGGGLVQPGGSLKLSCAASGFTFNKYAMNWVRQAPGKGLEWVARIRSKYDYKDDDDKADSVKDRFTISRDDSKNTAYLQMNNLKTEDTAVYYCVRHGNFGNSYISYWAYWGQGTLVTVSSGGGGSGGGSEVQLVESGGGLVQPGNSLRLSCAASGFTFSKFGMSWVRQAPGKGLEWVSSISGSGRDTLYAESVKGRFTISRDNAKTTLYLQMNSLRPEDTAVYYCTIGGSLSVSSQGTLVTVSSHHHHHH

SEQ ID NO: 295 - protein, 900 aa, Artificial Sequence
  Description of Artificial Sequence: Synthetic polypeptide
  Pro730
QVQLLESGGGLVQPGGSLRLSCAASGRTLDNYDMGWFRQGPGKEREFVAAISWSGGSTDYAYSVKGRFTISRDNSKNTLYLQMNSLRAEDTAVYYCAADLRFTGGDTMTPETYDYWGQGTLVTVSSGGGSGGGSEVQLVESGGGLVQPGGSLKLSCAASGFTFNKYAINWVRQAPGKGLEWVARIRSKYNNYATYYADQVKDRFTISRDDSKNTAYLQMNNLKTEDTAVYYCVRHANFGNSYISYWAYWGQGTLVTVSSGGGSGGGSQTVVTQEPSLTVSPGGTVTLTCASSTGAVTSGNYPNWVQQKPGQAPRGLIGGTKFLVPGTPARFSGSLLGGKAALTLSGVQPEDEAEYYCTLWYSNRWVFGGGTKLTVLGGGSGGGSQVQLLESGGGLVQPGGSLRLSCAASGRTLDNYDMGWFRQGPGKEREFVAAISWSGGSTDYAYSVKGRFTISRDNSKNTLYLQMNSLRAEDTAVYYCAADLRFTGGDTMTPETYDYWGQGTLVTVSSGARLQSAAPAGLKGAGQTVVTQEPSLTVSPGGTVTLTCGSSTGAVTSGNYPNWVQQKPGQAPRGLIGDYKDDDDKGTPARFSGSLLGGKAALTLSGVQPEDEAEYYCVLWYSNRWVFGGGTKLTVLGGGSGGGSEVQLVESGGGLVQPGGSLKLSCAASGFTFNKYAMNWVRQAPGKGLEWVARIRSKYDYKDDDDKADSVKDRFTISRDDSKNTAYLQMNNLKTEDTAVYYCVRHGNFGNSYISYWAYWGQGTLVTVSSGGGGSGGGSEVQLVESGGGLVQPGNSLRLSCAASGFTFSKFGMSWVRQAPGKGLEWVSSISGSGRDTLYAESVKGRFTISRDNAKTTLYLQMNSLRPEDTAVYYCTIGGSLSVSSQGTLVTVSSHHHHHH

SEQ ID NO: 296 - protein, 900 aa, Artificial Sequence
  Description of Artificial Sequence: Synthetic polypeptide
  Pro731
QVQLLESGGGLVQPGGSLRLSCAASGRTLDNYDMGWFRQGPGKEREFVAAISWSGGSTDYAYSVKGRFTISRDNSKNTLYLQMNSLRAEDTAVYYCAADLRFTGGDTMTPETYDYWGQGTLVTVSSGGGSGGGSEVQLVESGGGLVQPGGSLKLSCAASGFTFNKYAINWVRQAPGKGLEWVARIRSKYNNYATYYADQVKDRFTISRDDSKNTAYLQMNNLKTEDTAVYYCVRHANFGNSYISYWAYWGQGTLVTVSSGGGSGGGSQTVVTQEPSLTVSPGGTVTLTCASSTGAVTSGNYPNWVQQKPGQAPRGLIGGTKFLVPGTPARFSGSLLGGKAALTLSGVQPEDEAEYYCTLWYSNRWVFGGGTKLTVLGGGSGGGSQVQLLESGGGLVQPGGSLRLSCAASGRTLDNYDMGWFRQGPGKEREFVAAISWSGGSTDYAYSVKGRFTISRDNSKNTLYLQMNSLRAEDTAVYYCAADLRFTGGDTMTPETYDYWGQGTLVTVSSGGGSLSGRSDNHGGGSQTVVTQEPSLTVSPGGTVTLTCGSSTGAVTSGNYPNWVQQKPGQAPRGLIGDYKDDDDKGTPARFSGSLLGGKAALTLSGVQPEDEAEYYCVLWYSNRWVFGGGTKLTVLGGGSGGGSEVQLVESGGGLVQPGGSLKLSCAASGFTFNKYAMNWVRQAPGKGLEWVARIRSKYDYKDDDDKADSVKDRFTISRDDSKNTAYLQMNNLKTEDTAVYYCVRHGNFGNSYISYWAYWGQGTLVTVSSGGGGSGGGSEVQLVESGGGLVQPGNSLRLSCAASGFTFSKFGMSWVRQAPGKGLEWVSSISGSGRDTLYAESVKGRFTISRDNAKTTLYLQMNSLRPEDTAVYYCTIGGSLSVSSQGTLVTVSSHHHHHH

SEQ ID NO: 297 - protein, 903 aa, Artificial Sequence
  Description of Artificial Sequence: Synthetic polypeptide
  Pro676
QVQLLESGGGLVQPGGSLRLSCAASGFTFDYYAIGWFRQAPGKEREGVSCISSSHGSTYYADSVKGRFTISRDNSKNTVYLQMNSLRAEDTAVYYCATAGDGGDYHCSGLVDYGMDYWGKGTLVTVSSGGGSGGGSEVQLVESGGGLVQPGGSLKLSCAASGFTFNKYAINWVRQAPGKGLEWVARIRSKYNNYATYYADQVKDRFTISRDDSKNTAYLQMNNLKTEDTAVYYCVRHANFGNSYISYWAYWGQGTLVTVSSGGGSGGGSQTVVTQEPSLTVSPGGTVTLTCASSTGAVTSGNYPNWVQQKPGQAPRGLIGGTKFLVPGTPARFSGSLLGGKAALTLSGVQPEDEAEYYCTLWYSNRWVFGGGTKLTVLGGGSGGGSQVQLLESGGGLVQPGGSLRLSCAASGFTFDYYAIGWFRQAPGKEREGVSCISSSHGSTYYADSVKGRFTISRDNSKNTVYLQMNSLRAEDTAVYYCATAGDGGDYHCSGLVDYGMDYWGKGTLVTVSSSGGPGPAGMKGLPGSQTVVTQEPSLTVSPGGTVTLTCGSSTGAVTSGNYPNWVQQKPGQAPRGLIGDYKDDDDKGTPARFSGSLLGGKAALTLSGVQPEDEAEYYCVLWYSNRWVFGGGTKLTVLGGGSGGGSEVQLVESGGGLVQPGGSLKLSCAASGFTFNKYAMNWVRQAPGKGLEWVARIRSKYDYKDDDDKADSVKDRFTISRDDSKNTAYLQMNNLKTEDTAVYYCVRHGNFGNSYISYWAYWGQGTLVTVSSGGGGSGGGSEVQLVESGGGLVQPGNSLRLSCAASGFTFSKFGMSWVRQAPGKGLEWVSSISGSGRDTLYAESVKGRFTISRDNAKTTLYLQMNSLRPEDTAVYYCTIGGSLSVSSQGTLVTVSSHHHHHH

SEQ ID NO: 298 - protein, 905 aa, Artificial Sequence
  Description of Artificial Sequence: Synthetic polypeptide
  Pro677
QVQLLESGGGLVQPGGSLRLSCAASGRTFSSQSMGWFRQAPGKEREFVSAISWTGANPTYADSVKGRFTISRDNSKNTLYLQMNSLRAEDTAVYYCAADTSGGSYYYERATAETSYDYWGQGTLVTVSSGGGSGGGSEVQLVESGGGLVQPGGSLKLSCAASGFTFNKYAINWVRQAPGKGLEWVARIRSKYNNYATYYADQVKDRFTISRDDSKNTAYLQMNNLKTEDTAVYYCVRHANFGNSYISYWAYWGQGTLVTVSSGGGSGGGSQTVVTQEPSLTVSPGGTVTLTCASSTGAVTSGNYPNWVQQKPGQAPRGLIGGTKFLVPGTPARFSGSLLGGKAALTLSGVQPEDEAEYYCTLWYSNRWVFGGGTKLTVLGGGSGGGSQVQLLESGGGLVQPGGSLRLSCAASGRTFSSQSMGWFRQAPGKEREFVSAISWTGANPTYADSVKGRFTISRDNSKNTLYLQMNSLRAEDTAVYYCAADTSGGSYYYERATAETSYDYWGQGTLVTVSSSGGPGPAGMKGLPGSQTVVTQEPSLTVSPGGTVTLTCGSSTGAVTSGNYPNWVQQKPGQAPRGLIGDYKDDDDKGTPARFSGSLLGGKAALTLSGVQPEDEAEYYCVLWYSNRWVFGGGTKLTVLGGGSGGGSEVQLVESGGGLVQPGGSLKLSCAASGFTFNKYAMNWVRQAPGKGLEWVARIRSKYDYKDDDDKADSVKDRFTISRDDSKNTAYLQMNNLKTEDTAVYYCVRHGNFGNSYISYWAYWGQGTLVTVSSGGGGSGGGSEVQLVESGGGLVQPGNSLRLSCAASGFTFSKFGMSWVRQAPGKGLEWVSSISGSGRDTLYAESVKGRFTISRDNAKTTLYLQMNSLRPEDTAVYYCTIGGSLSVSSQGTLVTVSSHHHHHH

SEQ ID NO: 299 - protein, 893 aa, Artificial Sequence
  Description of Artificial Sequence: Synthetic polypeptide
  Pro678
QVQLLESGGGLVQPGGSLRLSCLASGRTVGRTAMGWFRQPPGKEREFVATISWAGGTTYYADFVKGRFTISRDNSKNTLYLQMNSLRAEDTAVYYCAASEPYSDYDPSGMVYWGKGTLVTVSSGGGSGGGSEVQLVESGGGLVQPGGSLKLSCAASGFTFNKYAINWVRQAPGKGLEWVARIRSKYNNYATYYADQVKDRFTISRDDSKNTAYLQMNNLKTEDTAVYYCVRHANFGNSYISYWAYWGQGTLVTVSSGGGSGGGSQTVVTQEPSLTVSPGGTVTLTCASSTGAVTSGNYPNWVQQKPGQAPRGLIGGTKFLVPGTPARFSGSLLGGKAALTLSGVQPEDEAEYYCTLWYSNRWVFGGGTKLTVLGGGSGGGSQVQLLESGGGLVQPGGSLRLSCLASGRTVGRTAMGWFRQPPGKEREFVATISWAGGTTYYADFVKGRFTISRDNSKNTLYLQMNSLRAEDTAVYYCAASEPYSDYDPSGMVYWGKGTLVTVSSSGGPGPAGMKGLPGSQTVVTQEPSLTVSPGGTVTLTCGSSTGAVTSGNYPNWVQQKPGQAPRGLIGDYKDDDDKGTPARFSGSLLGGKAALTLSGVQPEDEAEYYCVLWYSNRWVFGGGTKLTVLGGGSGGGSEVQLVESGGGLVQPGGSLKLSCAASGFTFNKYAMNWVRQAPGKGLEWVARIRSKYDYKDDDDKADSVKDRFTISRDDSKNTAYLQMNNLKTEDTAVYYCVRHGNFGNSYISYWAYWGQGTLVTVSSGGGGSGGGSEVQLVESGGGLVQPGNSLRLSCAASGFTFSKFGMSWVRQAPGKGLEWVSSISGSGRDTLYAESVKGRFTISRDNAKTTLYLQMNSLRPEDTAVYYCTIGGSLSVSSQGTLVTVSSHHHHHH

SEQ ID NO: 300 - protein, 893 aa, Artificial Sequence
  Description of Artificial Sequence: Synthetic polypeptide
  Pro679
QVQLLESGGGLVQPGGSLRLSCAASGRTFGRAAMGWFRQPPGKEREFAATISWSGSNTYYADFVKGRFTISRDNSKNTVYLQMNSLRAEDTAVYYCAASEPYSDYDPSGMVYWGKGTLVTVSSGGGSGGGSEVQLVESGGGLVQPGGSLKLSCAASGFTFNKYAINWVRQAPGKGLEWVARIRSKYNNYATYYADQVKDRFTISRDDSKNTAYLQMNNLKTEDTAVYYCVRHANFGNSYISYWAYWGQGTLVTVSSGGGSGGGSQTVVTQEPSLTVSPGGTVTLTCASSTGAVTSGNYPNWVQQKPGQAPRGLIGGTKFLVPGTPARFSGSLLGGKAALTLSGVQPEDEAEYYCTLWYSNRWVFGGGTKLTVLGGGSGGGSQVQLLESGGGLVQPGGSLRLSCAASGRTFGRAAMGWFRQPPGKEREFAATISWSGSNTYYADFVKGRFTISRDNSKNTVYLQMNSLRAEDTAVYYCAASEPYSDYDPSGMVYWGKGTLVTVSSSGGPGPAGMKGLPGSQTVVTQEPSLTVSPGGTVTLTCGSSTGAVTSGNYPNWVQQKPGQAPRGLIGDYKDDDDKGTPARFSGSLLGGKAALTLSGVQPEDEAEYYCVLWYSNRWVFGGGTKLTVLGGGSGGGSEVQLVESGGGLVQPGGSLKLSCAASGFTFNKYAMNWVRQAPGKGLEWVARIRSKYDYKDDDDKADSVKDRFTISRDDSKNTAYLQMNNLKTEDTAVYYCVRHGNFGNSYISYWAYWGQGTLVTVSSGGGGSGGGSEVQLVESGGGLVQPGNSLRLSCAASGFTFSKFGMSWVRQAPGKGLEWVSSISGSGRDTLYAESVKGRFTISRDNAKTTLYLQMNSLRPEDTAVYYCTIGGSLSVSSQGTLVTVSSHHHHHH

SEQ ID NO: 301 - protein, 897 aa, Artificial Sequence
  Description of Artificial Sequence: Synthetic polypeptide
  Pro808
QVQLLESGGGLVQPGGSLRLSCALSGLTFNTYPMAWFRQPPGQEREFVADMSWSGTNTYYADSVKGRFTISRDNSKNTLYLQMNSLRAEDTAVYYCAAGWPYSGTGRSTTDYTYWGQGTLVTVSSGGGSGGGSEVQLVESGGGLVQPGGSLKLSCAASGFTFNKYAINWVRQAPGKGLEWVARIRSKYNNYATYYADQVKDRFTISRDDSKNTAYLQMNNLKTEDTAVYYCVRHANFGNSYISYWAYWGQGTLVTVSSGGGSGGGSQTVVTQEPSLTVSPGGTVTLTCASSTGAVTSGNYPNWVQQKPGQAPRGLIGGTKFLVPGTPARFSGSLLGGKAALTLSGVQPEDEAEYYCTLWYSNRWVFGGGTKLTVLGGGSGGGSQVQLLESGGGLVQPGGSLRLSCALSGLTFNTYPMAWFRQPPGQEREFVADMSWSGTNTYYADSVKGRFTISRDNSKNTLYLQMNSLRAEDTAVYYCAAGWPYSGTGRSTTDYTYWGQGTLVTVSSSGGPGPAGMKGLPGSQTVVTQEPSLTVSPGGTVTLTCGSSTGAVTSGNYPNWVQQKPGQAPRGLIGDYKDDDDKGTPARFSGSLLGGKAALTLSGVQPEDEAEYYCVLWYSNRWVFGGGTKLTVLGGGSGGGSEVQLVESGGGLVQPGGSLKLSCAASGFTFNKYAMNWVRQAPGKGLEWVARIRSKYDYKDDDDKADSVKDRFTISRDDSKNTAYLQMNNLKTEDTAVYYCVRHGNFGNSYISYWAYWGQGTLVTVSSGGGGSGGGSEVQLVESGGGLVQPGNSLRLSCAASGFTFSKFGMSWVRQAPGKGLEWVSSISGSGRDTLYAESVKGRFTISRDNAKTTLYLQMNSLRPEDTAVYYCTIGGSLSVSSQGTLVTVSSHHHHHH

SEQ ID NO: 302 - protein, 899 aa, Artificial Sequence
  Description of Artificial Sequence: Synthetic polypeptide
  Pro819
QVQLLESGGGLVQPGGSLRLSCAASGRSFSRYGMGWLRQAPGKERELVASISWSGHSTYYADSVKGRFTISRDNSKNTLYLQMNSLRAEDTAVYYCAAESLPYESGSPRLTDFASWGQGTLVTVSSGGGSGGGSEVQLVESGGGLVQPGGSLKLSCAASGFTFNKYAINWVRQAPGKGLEWVARIRSKYNNYATYYADQVKDRFTISRDDSKNTAYLQMNNLKTEDTAVYYCVRHANFGNSYISYWAYWGQGTLVTVSSGGGSGGGSQTVVTQEPSLTVSPGGTVTLTCASSTGAVTSGNYPNWVQQKPGQAPRGLIGGTKFLVPGTPARFSGSLLGGKAALTLSGVQPEDEAEYYCTLWYSNRWVFGGGTKLTVLGGGSGGGSQVQLLESGGGLVQPGGSLRLSCAASGRSFSRYGMGWLRQAPGKERELVASISWSGHSTYYADSVKGRFTISRDNSKNTLYLQMNSLRAEDTAVYYCAAESLPYESGSPRLTDFASWGQGTLVTVSSSGGPGPAGMKGLPGSQTVVTQEPSLTVSPGGTVTLTCGSSTGAVTSGNYPNWVQQKPGQAPRGLIGDYKDDDDKGTPARFSGSLLGGKAALTLSGVQPEDEAEYYCVLWYSNRWVFGGGTKLTVLGGGSGGGSEVQLVESGGGLVQPGGSLKLSCAASGFTFNKYAMNWVRQAPGKGLEWVARIRSKYDYKDDDDKADSVKDRFTISRDDSKNTAYLQMNNLKTEDTAVYYCVRHGNFGNSYISYWAYWGQGTLVTVSSGGGGSGGGSEVQLVESGGGLVQPGNSLRLSCAASGFTFSKFGMSWVRQAPGKGLEWVSSISGSGRDTLYAESVKGRFTISRDNAKTTLYLQMNSLRPEDTAVYYCTIGGSLSVSSQGTLVTVSSHHHHHH

SEQ ID NO: 303 - protein, 905 aa, Artificial Sequence
  Description of Artificial Sequence: Synthetic polypeptide
  Pro681
QVQLLESGGGLVQPGGSLRLSCAASGRTFSSQSMGWFRQAPGKEREFVSAISWTGANPTYADSVKGRFTISRDNSKNTLYLQMNSLRAEDTAVYYCAADTSGGSYYYERATAETSYDYWGQGTLVTVSSGGGSGGGSEVQLVESGGGLVQPGGSLKLSCAASGFTFNKYAINWVRQAPGKGLEWVARIRSKYNNYATYYADQVKDRFTISRDDSKNTAYLQMNNLKTEDTAVYYCVRHANFGNSYISYWAYWGQGTLVTVSSGGGSGGGSQTVVTQEPSLTVSPGGTVTLTCASSTGAVTSGNYPNWVQQKPGQAPRGLIGGTKFLVPGTPARFSGSLLGGKAALTLSGVQPEDEAEYYCTLWYSNRWVFGGGTKLTVLGGGSGGGSQVQLLESGGGLVQPGGSLRLSCAASGRTFSSQSMGWFRQAPGKEREFVSAISWTGANPTYADSVKGRFTISRDNSKNTLYLQMNSLRAEDTAVYYCAADTSGGSYYYERATAETSYDYWGQGTLVTVSSGGGGSGGGGSGGGGSQTVVTQEPSLTVSPGGTVTLTCGSSTGAVTSGNYPNWVQQKPGQAPRGLIGDYKDDDDKGTPARFSGSLLGGKAALTLSGVQPEDEAEYYCVLWYSNRWVFGGGTKLTVLGGGSGGGSEVQLVESGGGLVQPGGSLKLSCAASGFTFNKYAMNWVRQAPGKGLEWVARIRSKYDYKDDDDKADSVKDRFTISRDDSKNTAYLQMNNLKTEDTAVYYCVRHGNFGNSYISYWAYWGQGTLVTVSSGGGGSGGGSEVQLVESGGGLVQPGNSLRLSCAASGFTFSKFGMSWVRQAPGKGLEWVSSISGSGRDTLYAESVKGRFTISRDNAKTTLYLQMNSLRPEDTAVYYCTIGGSLSVSSQGTLVTVSSHHHHHH

SEQ ID NO: 304 - protein, 896 aa, Artificial Sequence
  Description of Artificial Sequence: Synthetic polypeptide
  Pro621
QVQLQESGGGLVQPGGSLRLSCAPSRRTFHTYHMGWFRQAPGKEREFVAVINWSGGSTVYADSVKGRFTISRDNSKNTLYLQMNSLRAEDTAVYYCAAGGATTQRATEASYDYWGQGTLVTVSSGGGSGGGSEVQLVESGGGLVQPGGSLKLSCAASGFTFNKYAINWVRQAPGKGLEWVARIRSKYNNYATYYADQVKDRFTISRDDSKNTAYLQMNNLKTEDTAVYYCVRHANFGNSYISYWAYWGQGTLVTVSSGGGSGGGSQTVVTQEPSLTVSPGGTVTLTCASSTGAVTSGNYPNWVQQKPGQAPRGLIGGTKFLVPGTPARFSGSLLGGKAALTLSGVQPEDEAEYYCTLWYSNRWVFGGGTKLTVLGGGSGGGSQVQLQESGGGLVQPGGSLRLSCAPSRRTFHTYHMGWFRQAPGKEREFVAVINWSGGSTVYADSVKGRFTISRDNSKNTLYLQMNSLRAEDTAVYYCAAGGATTQRATEASYDYWGQGTLVTVSSGGGSARLQSAAPGGGSQTVVTQEPSLTVSPGGTVTLTCGSSTGAVTSGNYPNWVQQKPGQAPRGLIGDYKDDDDKGTPARFSGSLLGGKAALTLSGVQPEDEAEYYCVLWYSNRWVFGGGTKLTVLGGGSGGGSEVQLVESGGGLVQPGGSLKLSCAASGFTFNKYAMNWVRQAPGKGLEWVARIRSKYDYKDDDDKADSVKDRFTISRDDSKNTAYLQMNNLKTEDTAVYYCVRHGNFGNSYISYWAYWGQGTLVTVSSGGGGSGGGSEVQLVESGGGLVQPGNSLRLSCAASGFTFSKFGMSWVRQAPGKGLEWVSSISGSGRDTLYAESVKGRFTISRDNAKTTLYLQMNSLRPEDTAVYYCTIGGSLSVSSQGTLVTVSSHHHHHH

SEQ ID NO: 305 - protein, 892 aa, Artificial Sequence
  Description of Artificial Sequence: Synthetic polypeptide
  Pro622
QVQLQESGGGLVQPGGSLRLSCEASPRTFSTYSMAWFRQAPGKERSFVAAINWSGGNTSYADSVKGRFTISRDNSKNTLYLQMNSLRAEDTAVYYCAAGGVLAHHNYEYDYWGQGTLVTVSSGGGSGGGSEVQLVESGGGLVQPGGSLKLSCAASGFTFNKYAINWVRQAPGKGLEWVARIRSKYNNYATYYADQVKDRFTISRDDSKNTAYLQMNNLKTEDTAVYYCVRHANFGNSYISYWAYWGQGTLVTVSSGGGSGGGSQTVVTQEPSLTVSPGGTVTLTCASSTGAVTSGNYPNWVQQKPGQAPRGLIGGTKFLVPGTPARFSGSLLGGKAALTLSGVQPEDEAEYYCTLWYSNRWVFGGGTKLTVLGGGSGGGSQVQLQESGGGLVQPGGSLRLSCEASPRTFSTYSMAWFRQAPGKERSFVAAINWSGGNTSYADSVKGRFTISRDNSKNTLYLQMNSLRAEDTAVYYCAAGGVLAHHNYEYDYWGQGTLVTVSSGGGSARLQSAAPGGGSQTVVTQEPSLTVSPGGTVTLTCGSSTGAVTSGNYPNWVQQKPGQAPRGLIGDYKDDDDKGTPARFSGSLLGGKAALTLSGVQPEDEAEYYCVLWYSNRWVFGGGTKLTVLGGGSGGGSEVQLVESGGGLVQPGGSLKLSCAASGFTFNKYAMNWVRQAPGKGLEWVARIRSKYDYKDDDDKADSVKDRFTISRDDSKNTAYLQMNNLKTEDTAVYYCVRHGNFGNSYISYWAYWGQGTLVTVSSGGGGSGGGSEVQLVESGGGLVQPGNSLRLSCAASGFTFSKFGMSWVRQAPGKGLEWVSSISGSGRDTLYAESVKGRFTISRDNAKTTLYLQMNSLRPEDTAVYYCTIGGSLSVSSQGTLVTVSSHHHHHH

SEQ ID NO: 306 - protein, 897 aa, Artificial Sequence
  Description of Artificial Sequence: Synthetic polypeptide
  Pro640
QVQLQESGGGLVQPGGSLRLSCAPSRRTFHTYHMGWFRQAPGKEREFVAVINWSGGSTVYADSVKGRFTISRDNSKNTLYLQMNSLRAEDTAVYYCAAGGATTQRATEASYDYWGQGTLVTVSSGGGSGGGSEVQLVESGGGLVQPGGSLKLSCAASGFTFNKYAINWVRQAPGKGLEWVARIRSKYNNYATYYADQVKDRFTISRDDSKNTAYLQMNNLKTEDTAVYYCVRHANFGNSYISYWAYWGQGTLVTVSSGGGSGGGSQTVVTQEPSLTVSPGGTVTLTCASSTGAVTSGNYPNWVQQKPGQAPRGLIGGTKFLVPGTPARFSGSLLGGKAALTLSGVQPEDEAEYYCTLWYSNRWVFGGGTKLTVLGGGSGGGSQVQLQESGGGLVQPGGSLRLSCAPSRRTFHTYHMGWFRQAPGKEREFVAVINWSGGSTVYADSVKGRFTISRDNSKNTLYLQMNSLRAEDTAVYYCAAGGATTQRATEASYDYWGQGTLVTVSSGSGGPGPAGMHGLPGGSQTVVTQEPSLTVSPGGTVTLTCGSSTGAVTSGNYPNWVQQKPGQAPRGLIGDYKDDDDKGTPARFSGSLLGGKAALTLSGVQPEDEAEYYCVLWYSNRWVFGGGTKLTVLGGGSGGGSEVQLVESGGGLVQPGGSLKLSCAASGFTFNKYAMNWVRQAPGKGLEWVARIRSKYDYKDDDDKADSVKDRFTISRDDSKNTAYLQMNNLKTEDTAVYYCVRHGNFGNSYISYWAYWGQGTLVTVSSGGGGSGGGSEVQLVESGGGLVQPGNSLRLSCAASGFTFSKFGMSWVRQAPGKGLEWVSSISGSGRDTLYAESVKGRFTISRDNAKTTLYLQMNSLRPEDTAVYYCTIGGSLSVSSQGTLVTVSSHHHHHH

SEQ ID NO: 307 - protein, 893 aa, Artificial Sequence
  Description of Artificial Sequence: Synthetic polypeptide
  Pro641
QVQLQESGGGLVQPGGSLRLSCEASPRTFSTYSMAWFRQAPGKERSFVAAINWSGGNTSYADSVKGRFTISRDNSKNTLYLQMNSLRAEDTAVYYCAAGGVLAHHNYEYDYWGQGTLVTVSSGGGSGGGSEVQLVESGGGLVQPGGSLKLSCAASGFTFNKYAINWVRQAPGKGLEWVARIRSKYNNYATYYADQVKDRFTISRDDSKNTAYLQMNNLKTEDTAVYYCVRHANFGNSYISYWAYWGQGTLVTVSSGGGSGGGSQTVVTQEPSLTVSPGGTVTLTCASSTGAVTSGNYPNWVQQKPGQAPRGLIGGTKFLVPGTPARFSGSLLGGKAALTLSGVQPEDEAEYYCTLWYSNRWVFGGGTKLTVLGGGSGGGSQVQLQESGGGLVQPGGSLRLSCEASPRTFSTYSMAWFRQAPGKERSFVAAINWSGGNTSYADSVKGRFTISRDNSKNTLYLQMNSLRAEDTAVYYCAAGGVLAHHNYEYDYWGQGTLVTVSSGSGGPGPAGMHGLPGGSQTVVTQEPSLTVSPGGTVTLTCGSSTGAVTSGNYPNWVQQKPGQAPRGLIGDYKDDDDKGTPARFSGSLLGGKAALTLSGVQPEDEAEYYCVLWYSNRWVFGGGTKLTVLGGGSGGGSEVQLVESGGGLVQPGGSLKLSCAASGFTFNKYAMNWVRQAPGKGLEWVARIRSKYDYKDDDDKADSVKDRFTISRDDSKNTAYLQMNNLKTEDTAVYYCVRHGNFGNSYISYWAYWGQGTLVTVSSGGGGSGGGSEVQLVESGGGLVQPGNSLRLSCAASGFTFSKFGMSWVRQAPGKGLEWVSSISGSGRDTLYAESVKGRFTISRDNAKTTLYLQMNSLRPEDTAVYYCTIGGSLSVSSQGTLVTVSSHHHHHH

SEQ ID NO: 308 - protein, 895 aa, Artificial Sequence
  Description of Artificial Sequence: Synthetic polypeptide
  Pro642
QVQLQESGGGLVQPGGSLRLSCAPSRRTFHTYHMGWFRQAPGKEREFVAVINWSGGSTVYADSVKGRFTISRDNSKNTLYLQMNSLRAEDTAVYYCAAGGATTQRATEASYDYWGQGTLVTVSSGGGSGGGSEVQLVESGGGLVQPGGSLKLSCAASGFTFNKYAINWVRQAPGKGLEWVARIRSKYNNYATYYADQVKDRFTISRDDSKNTAYLQMNNLKTEDTAVYYCVRHANFGNSYISYWAYWGQGTLVTVSSGGGSGGGSQTVVTQEPSLTVSPGGTVTLTCASSTGAVTSGNYPNWVQQKPGQAPRGLIGGTKFLVPGTPARFSGSLLGGKAALTLSGVQPEDEAEYYCTLWYSNRWVFGGGTKLTVLGGGSGGGSQVQLQESGGGLVQPGGSLRLSCAPSRRTFHTYHMGWFRQAPGKEREFVAVINWSGGSTVYADSVKGRFTISRDNSKNTLYLQMNSLRAEDTAVYYCAAGGATTQRATEASYDYWGQGTLVTVSSGSGGPGPAGMHGLPGGSQTVVTQEPSLTVSPGGTVTLTCGSSTGAVTSGNYPNWVQQKPGQAPRGLIGGTKDDAPGTPARFSGSLLGGKAALTLSGVQPEDEAEYYCVLWYSNRWVFGGGTKLTVLGGGSGGGSEVQLVESGGGLVQPGGSLKLSCAASGFTFNKHAMNWVRQAPGKGLEWVARIRSKYNNYATAYADSVKDRFTISRDDSKNTAYLQMNNLKTEDTAVYYCVRHGNFGNSYISYWAYWGQGTLVTVSSGGGGSGGGSEVQLVESGGGLVQPGNSLRLSCAASGFTFSKFGMSWVRQAPGKGLEWVSSISGSGRDTLYAESVKGRFTISRDNAKTTLYLQMNSLRPEDTAVYYCTIGGSLSVSSQGTLVTVSSHHHHHH

SEQ ID NO: 309 - protein, 891 aa, Artificial Sequence
  Description of Artificial Sequence: Synthetic polypeptide
  Pro643
QVQLQESGGGLVQPGGSLRLSCEASPRTFSTYSMAWFRQAPGKERSFVAAINWSGGNTSYADSVKGRFTISRDNSKNTLYLQMNSLRAEDTAVYYCAAGGVLAHHNYEYDYWGQGTLVTVSSGGGSGGGSEVQLVESGGGLVQPGGSLKLSCAASGFTFNKYAINWVRQAPGKGLEWVARIRSKYNNYATYYADQVKDRFTISRDDSKNTAYLQMNNLKTEDTAVYYCVRHANFGNSYISYWAYWGQGTLVTVSSGGGSGGGSQTVVTQEPSLTVSPGGTVTLTCASSTGAVTSGNYPNWVQQKPGQAPRGLIGGTKFLVPGTPARFSGSLLGGKAALTLSGVQPEDEAEYYCTLWYSNRWVFGGGTKLTVLGGGSGGGSQVQLQESGGGLVQPGGSLRLSCEASPRTFSTYSMAWFRQAPGKERSFVAAINWSGGNTSYADSVKGRFTISRDNSKNTLYLQMNSLRAEDTAVYYCAAGGVLAHHNYEYDYWGQGTLVTVSSGSGGPGPAGMHGLPGGSQTVVTQEPSLTVSPGGTVTLTCGSSTGAVTSGNYPNWVQQKPGQAPRGLIGGTKDDAPGTPARFSGSLLGGKAALTLSGVQPEDEAEYYCVLWYSNRWVFGGGTKLTVLGGGSGGGSEVQLVESGGGLVQPGGSLKLSCAASGFTFNKHAMNWVRQAPGKGLEWVARIRSKYNNYATAYADSVKDRFTISRDDSKNTAYLQMNNLKTEDTAVYYCVRHGNFGNSYISYWAYWGQGTLVTVSSGGGGSGGGSEVQLVESGGGLVQPGNSLRLSCAASGFTFSKFGMSWVRQAPGKGLEWVSSISGSGRDTLYAESVKGRFTISRDNAKTTLYLQMNSLRPEDTAVYYCTIGGSLSVSSQGTLVTVSSHHHHHH

SEQ ID NO: 310 - protein, 895 aa, Artificial Sequence
  Description of Artificial Sequence: Synthetic polypeptide
  Pro744
QVQLQESGGGLVQPGGSLRLSCAPSRRTFHTYHMGWFRQAPGKEREFVAVINWSGGSTVYADSVKGRFTISRDNSKNTLYLQMNSLRAEDTAVYYCAAGGATTQRATEASYDYWGQGTLVTVSSGGGSGGGSEVQLVESGGGLVQPGGSLKLSCAASGFTFNKYAINWVRQAPGKGLEWVARIRSKYNNYATYYADQVKDRFTISRDDSKNTAYLQMNNLKTEDTAVYYCVRHANFGNSYISYWAYWGQGTLVTVSSGGGSGGGSQTVVTQEPSLTVSPGGTVTLTCASSTGAVTSGNYPNWVQQKPGQAPRGLIGGTKFLVPGTPARFSGSLLGGKAALTLSGVQPEDEAEYYCTLWYSNRWVFGGGTKLTVLGGGSGGGSQVQLQESGGGLVQPGGSLRLSCAPSRRTFHTYHMGWFRQAPGKEREFVAVINWSGGSTVYADSVKGRFTISRDNSKNTLYLQMNSLRAEDTAVYYCAAGGATTQRATEASYDYWGQGTLVTVSSSGGPGPAGMEGLPGSQTVVTQEPSLTVSPGGTVTLTCGSSTGAVTSGNYPNWVQQKPGQAPRGLIGDYKDDDDKGTPARFSGSLLGGKAALTLSGVQPEDEAEYYCVLWYSNRWVFGGGTKLTVLGGGSGGGSEVQLVESGGGLVQPGGSLKLSCAASGFTFNKYAMNWVRQAPGKGLEWVARIRSKYDYKDDDDKADSVKDRFTISRDDSKNTAYLQMNNLKTEDTAVYYCVRHGNFGNSYISYWAYWGQGTLVTVSSGGGGSGGGSEVQLVESGGGLVQPGNSLRLSCAASGFTFSKFGMSWVRQAPGKGLEWVSSISGSGRDTLYAESVKGRFTISRDNAKTTLYLQMNSLRPEDTAVYYCTIGGSLSVSSQGTLVTVSSHHHHHH

SEQ ID NO: 311 - protein, 895 aa, Artificial Sequence
  Description of Artificial Sequence: Synthetic polypeptide
  Pro746
QVQLQESGGGLVQPGGSLRLSCAPSRRTFHTYHMGWFRQAPGKEREFVAVINWSGGSTVYADSVKGRFTISRDNSKNTLYLQMNSLRAEDTAVYYCAAGGATTQRATEASYDYWGQGTLVTVSSGGGSGGGSEVQLVESGGGLVQPGGSLKLSCAASGFTFNKYAINWVRQAPGKGLEWVARIRSKYNNYATYYADQVKDRFTISRDDSKNTAYLQMNNLKTEDTAVYYCVRHANFGNSYISYWAYWGQGTLVTVSSGGGSGGGSQTVVTQEPSLTVSPGGTVTLTCASSTGAVTSGNYPNWVQQKPGQAPRGLIGGTKFLVPGTPARFSGSLLGGKAALTLSGVQPEDEAEYYCTLWYSNRWVFGGGTKLTVLGGGSGGGSQVQLQESGGGLVQPGGSLRLSCAPSRRTFHTYHMGWFRQAPGKEREFVAVINWSGGSTVYADSVKGRFTISRDNSKNTLYLQMNSLRAEDTAVYYCAAGGATTQRATEASYDYWGQGTLVTVSSSGGPGPAGPKGLPGSQTVVTQEPSLTVSPGGTVTLTCGSSTGAVTSGNYPNWVQQKPGQAPRGLIGDYKDDDDKGTPARFSGSLLGGKAALTLSGVQPEDEAEYYCVLWYSNRWVFGGGTKLTVLGGGSGGGSEVQLVESGGGLVQPGGSLKLSCAASGFTFNKYAMNWVRQAPGKGLEWVARIRSKYDYKDDDDKADSVKDRFTISRDDSKNTAYLQMNNLKTEDTAVYYCVRHGNFGNSYISYWAYWGQGTLVTVSSGGGGSGGGSEVQLVESGGGLVQPGNSLRLSCAASGFTFSKFGMSWVRQAPGKGLEWVSSISGSGRDTLYAESVKGRFTISRDNAKTTLYLQMNSLRPEDTAVYYCTIGGSLSVSSQGTLVTVSSHHHHHH

SEQ ID NO: 312 - protein, 877 aa, Artificial Sequence
  Description of Artificial Sequence: Synthetic polypeptide
  Pro 108
QVQLVESGGGLVQPGGSLRLSCAASGFTVSNSVMAWYRQTPGNEREFVAIINSIGITNYADSVKGRFTISRDNSKNTLYLQMNSLRAEDTAVYVCNRNFDRIYWGQGTLVTVSSGGGSGGGSEVQLVESGGGLVQPGGSLKLSCAASGFTFNKYAINWVRQAPGKGLEWVARIRSKYNNYATYYADQVKDRFTISRDDSKNTAYLQMNNLKTEDTAVYYCVRHANFGNSYISYWAYWGQGTLVTVSSGGGSGGGSQTVVTQEPSLTVSPGGTVTLTCASSTGAVTSGNYPNWVQQKPGQAPRGLIGGTKFLVPGTPARFSGSLLGGKAALTLSGVQPEDEAEYYCTLWYSNRWVFGGGTKLTVLGGGSGGGSQVQLVESGGGLVQPGGSLRLSCAASGFTVSNSVMAWYRQTPGNEREFVAIINSIGITNYADSVKGRFTISRDNSKNTLYLQMNSLRAEDTAVYVCNRNFDRIYWGQGTLVTVSSGSGGPGPAGMHGLPGGSQTVVTQEPSLTVSPGGTVTLTCGSSTGAVTSGNYPNWVQQKPGQAPRGLIGDYKDDDDKGTPARFSGSLLGGKAALTLSGVQPEDEAEYYCVLWYSNRWVFGGGTKLTVLGGGSGGGSEVQLVESGGGLVQPGGSLKLSCAASGFTFNKYAMNWVRQAPGKGLEWVARIRSKYDYKDDDDKADSVKDRFTISRDDSKNTAYLQMNNLKTEDTAVYYCVRHGNFGNSYISYWAYWGQGTLVTVSSGGGGSGGGSEVQLVESGGGLVQPGNSLRLSCAASGFTFSKFGMSWVRQAPGKGLEWVSSISGSGRDTLYAESVKGRFTISRDNAKTTLYLQMNSLRPEDTAVYYCTIGGSLSVSSQGTLVTVSSHHHHHH

SEQ ID NO: 313 - protein, 875 aa, Artificial Sequence
  Description of Artificial Sequence: Synthetic polypeptide
  Pro 109
QVQLVESGGGLVQPGGSLRLSCAAPGNTFSISAMGWYRQAPGKQREWVAVTHSDYSTNYADSVKGRFTISRDNSKNTLYLQMNSLRAEDTAVYYCKHYGIDYWGQGTLVTVSSGGGSGGGSEVQLVESGGGLVQPGGSLKLSCAASGFTFNKYAINWVRQAPGKGLEWVARIRSKYNNYATYYADQVKDRFTISRDDSKNTAYLQMNNLKTEDTAVYYCVRHANFGNSYISYWAYWGQGTLVTVSSGGGSGGGSQTVVTQEPSLTVSPGGTVTLTCASSTGAVTSGNYPNWVQQKPGQAPRGLIGGTKFLVPGTPARFSGSLLGGKAALTLSGVQPEDEAEYYCTLWYSNRWVFGGGTKLTVLGGGSGGGSQVQLVESGGGLVQPGGSLRLSCAAPGNTFSISAMGWYRQAPGKQREWVAVTHSDYSTNYADSVKGRFTISRDNSKNTLYLQMNSLRAEDTAVYYCKHYGIDYWGQGTLVTVSSGSGGPGPAGMHGLPGGSQTVVTQEPSLTVSPGGTVTLTCGSSTGAVTSGNYPNWVQQKPGQAPRGLIGDYKDDDDKGTPARFSGSLLGGKAALTLSGVQPEDEAEYYCVLWYSNRWVFGGGTKLTVLGGGSGGGSEVQLVESGGGLVQPGGSLKLSCAASGFTFNKYAMNWVRQAPGKGLEWVARIRSKYDYKDDDDKADSVKDRFTISRDDSKNTAYLQMNNLKTEDTAVYYCVRHGNFGNSYISYWAYWGQGTLVTVSSGGGGSGGGSEVQLVESGGGLVQPGNSLRLSCAASGFTFSKFGMSWVRQAPGKGLEWVSSISGSGRDTLYAESVKGRFTISRDNAKTTLYLQMNSLRPEDTAVYYCTIGGSLSVSSQGTLVTVSSHHHHHH

SEQ ID NO: 314 - protein, 897 aa, Artificial Sequence
  Description of Artificial Sequence: Synthetic polypeptide
  Pro396
QVKLEESGGGSVQTGGSLRLTCAASGRTSRSYGMGWFRQAPGKEREFVSGISWRGDSTGYADSVKGRFTISRDNAKNTVDLQMNSLKPEDTAIYYCAAAAGSAWYGTLYEYDYWGQGTQVTVSSGGGSGGGSEVQLVESGGGLVQPGGSLKLSCAASGFTFNKYAINWVRQAPGKGLEWVARIRSKYNNYATYYADQVKDRFTISRDDSKNTAYLQMNNLKTEDTAVYYCVRHANFGNSYISYWAYWGQGTLVTVSSGGGSGGGSQTVVTQEPSLTVSPGGTVTLTCASSTGAVTSGNYPNWVQQKPGQAPRGLIGGTKFLVPGTPARFSGSLLGGKAALTLSGVQPEDEAEYYCTLWYSNRWVFGGGTKLTVLGGGSGGGSQVKLEESGGGSVQTGGSLRLTCAASGRTSRSYGMGWFRQAPGKEREFVSGISWRGDSTGYADSVKGRFTISRDNAKNTVDLQMNSLKPEDTAIYYCAAAAGSAWYGTLYEYDYWGQGTQVTVSSGSGGPGPAGMHGLPGGSQTVVTQEPSLTVSPGGTVTLTCGSSTGAVTSGNYPNWVQQKPGQAPRGLIGDYKDDDDKGTPARFSGSLLGGKAALTLSGVQPEDEAEYYCVLWYSNRWVFGGGTKLTVLGGGSGGGSEVQLVESGGGLVQPGGSLKLSCAASGFTFNKYAMNWVRQAPGKGLEWVARIRSKYDYKDDDDKADSVKDRFTISRDDSKNTAYLQMNNLKTEDTAVYYCVRHGNFGNSYISYWAYWGQGTLVTVSSGGGGSGGGSEVQLVESGGGLVQPGNSLRLSCAASGFTFSKFGMSWVRQAPGKGLEWVSSISGSGRDTLYAESVKGRFTISRDNAKTTLYLQMNSLRPEDTAVYYCTIGGSLSVSSQGTLVTVSSHHHHHH

SEQ ID NO: 315 - protein, 893 aa, Artificial Sequence
  Description of Artificial Sequence: Synthetic polypeptide
  Pro476
QVKLEESGGGSVQTGGSLRLTCAASGRTSRSYGMGWFRQAPGKEREFVSGISWRGDSTGYADSVKGRFTISRDNAKNTVDLQMNSLKPEDTAIYYCAAAAGSAWYGTLYEYDYWGQGTQVTVSSGGGSGGGSEVQLVESGGGLVQPGGSLKLSCAASGFTFNKYAINWVRQAPGKGLEWVARIRSKYNNYATYYADQVKDRFTISRDDSKNTAYLQMNNLKTEDTAVYYCVRHANFGNSYISYWAYWGQGTLVTVSSGGGSGGGSQTVVTQEPSLTVSPGGTVTLTCASSTGAVTSGNYPNWVQQKPGQAPRGLIGGTKFLVPGTPARFSGSLLGGKAALTLSGVQPEDEAEYYCTLWYSNRWVFGGGTKLTVLGGGSGGGSQVKLEESGGGSVQTGGSLRLTCAASGRTSRSYGMGWFRQAPGKEREFVSGISWRGDSTGYADSVKGRFTISRDNAKNTVDLQMNSLKPEDTAIYYCAAAAGSAWYGTLYEYDYWGQGTQVTVSSSGGPGPAGMKGLPGSQTVVTQEPSLTVSPGGTVTLTCGSSTGAVTSGNYPNWVQQKPGQAPRGLIGGTKDDAPGTPARFSGSLLGGKAALTLSGVQPEDEAEYYCVLWYSNRWVFGGGTKLTVLGGGSGGGSEVQLVESGGGLVQPGGSLKLSCAASGFTFNKHAMNWVRQAPGKGLEWVARIRSKYNNYATAYADSVKDRFTISRDDSKNTAYLQMNNLKTEDTAVYYCVRHGNFGNSYISYWAYWGQGTLVTVSSGGGGSGGGSEVQLVESGGGLVQPGNSLRLSCAASGFTFSKFGMSWVRQAPGKGLEWVSSISGSGRDTLYAESVKGRFTISRDNAKTTLYLQMNSLRPEDTAVYYCTIGGSLSVSSQGTLVTVSSHHHHHH

SEQ ID NO: 316 - protein, 896 aa, Artificial Sequence
  Description of Artificial Sequence: Synthetic polypeptide
  Pro706
QVKLEESGGGSVQTGGSLRLTCAASGRTSRSYGMGWFRQAPGKEREFVSGISWRGDSTGYADSVKGRFTISRDNAKNTVDLQMNSLKPEDTAIYYCAAAAGSAWYGTLYEYDYWGQGTQVTVSSGGGSGGGSEVQLVESGGGLVQPGGSLKLSCAASGFTFNKYAINWVRQAPGKGLEWVARIRSKYNNYATYYADQVKDRFTISRDDSKNTAYLQMNNLKTEDTAVYYCVRHANFGNSYISYWAYWGQGTLVTVSSGGGSGGGSQTVVTQEPSLTVSPGGTVTLTCASSTGAVTSGNYPNWVQQKPGQAPRGLIGGTKFLVPGTPARFSGSLLGGKAALTLSGVQPEDEAEYYCTLWYSNRWVFGGGTKLTVLGGGSGGGSQVKLEESGGGSVQTGGSLRLTCAASGRTSRSYGMGWFRQAPGKEREFVSGISWRGDSTGYADSVKGRFTISRDNAKNTVDLQMNSLKPEDTAIYYCAAAAGSAWYGTLYEYDYWGQGTQVTVSSGGGSHTGRSAYFGGGSQTVVTQEPSLTVSPGGTVTLTCGSSTGAVTSGNYPNWVQQKPGQAPRGLIGDYKDDDDKGTPARFSGSLLGGKAALTLSGVQPEDEAEYYCVLWYSNRWVFGGGTKLTVLGGGSGGGSEVQLVESGGGLVQPGGSLKLSCAASGFTFNKYAMNWVRQAPGKGLEWVARIRSKYDYKDDDDKADSVKDRFTISRDDSKNTAYLQMNNLKTEDTAVYYCVRHGNFGNSYISYWAYWGQGTLVTVSSGGGGSGGGSEVQLVESGGGLVQPGNSLRLSCAASGFTFSKFGMSWVRQAPGKGLEWVSSISGSGRDTLYAESVKGRFTISRDNAKTTLYLQMNSLRPEDTAVYYCTIGGSLSVSSQGTLVTVSSHHHHHH

SEQ ID NO: 317 - protein, 895 aa, Artificial Sequence
  Description of Artificial Sequence: Synthetic polypeptide
  Pro709
EVQLVESGGGVVRPGGSLRLSCAASGRTSRSYGMGWFRQAPGKEREFVSGISWRGDSTGYADSVKGRFTISRDNAKNSLYLQMNSLRAEDTALYYCAAAAGSAWYGTLYEYDYWGQGTLVTVSSGGGSGGGSEVQLVESGGGLVQPGGSLKLSCAASGFTFNKYAINWVRQAPGKGLEWVARIRSKYNNYATYYADQVKDRFTISRDDSKNTAYLQMNNLKTEDTAVYYCVRHANFGNSYISYWAYWGQGTLVTVSSGGGSGGGSQTVVTQEPSLTVSPGGTVTLTCASSTGAVTSGNYPNWVQQKPGQAPRGLIGGTKFLVPGTPARFSGSLLGGKAALTLSGVQPEDEAEYYCTLWYSNRWVFGGGTKLTVLGGGSGGGSEVQLVESGGGVVRPGGSLRLSCAASGRTSRSYGMGWFRQAPGKEREFVSGISWRGDSTGYADSVKGRFTISRDNAKNSLYLQMNSLRAEDTALYYCAAAAGSAWYGTLYEYDYWGQGTLVTVSSSGGPGPAGMKGLPGSQTVVTQEPSLTVSPGGTVTLTCGSSTGAVTSGNYPNWVQQKPGQAPRGLIGDYKDDDDKGTPARFSGSLLGGKAALTLSGVQPEDEAEYYCVLWYSNRWVFGGGTKLTVLGGGSGGGSEVQLVESGGGLVQPGGSLKLSCAASGFTFNKYAMNWVRQAPGKGLEWVARIRSKYDYKDDDDKADSVKDRFTISRDDSKNTAYLQMNNLKTEDTAVYYCVRHGNFGNSYISYWAYWGQGTLVTVSSGGGGSGGGSEVQLVESGGGLVQPGNSLRLSCAASGFTFSKFGMSWVRQAPGKGLEWVSSISGSGRDTLYAESVKGRFTISRDNAKTTLYLQMNSLRPEDTAVYYCTIGGSLSVSSQGTLVTVSSHHHHHH

SEQ ID NO: 318 - protein, 885 aa, Artificial Sequence
  Description of Artificial Sequence: Synthetic polypeptide
  Pro470
QVQLVESGGGLVQPGGSLRLSCAASGFTVSNSVMAWYRQTPGNEREFVAIINSIGITNYADSVKGRFTISRDNSKNTLYLQMNSLRAEDTAVYVCNRNFDRIYWGQGTLVTVSSGGGSGGGSEVQLVESGGGLVQPGGSLKLSCAASGFTFNKYAINWVRQAPGKGLEWVARIRSKYNNYATYYADQVKDRFTISRDDSKNTAYLQMNNLKTEDTAVYYCVRHANFGNSYISYWAYWGQGTLVTVSSGGGSGGGSQTVVTQEPSLTVSPGGTVTLTCASSTGAVTSGNYPNWVQQKPGQAPRGLIGGTKFLVPGTPARFSGSLLGGKAALTLSGVQPEDEAEYYCTLWYSNRWVFGGGTKLTVLGGGSGGGSQVKLVESGGGVVRPGGSLTLSCAASGRTSRSYGMGWFRQAPGKEREFVSGISWRGDSTGYADSVKGRFTISRDNAKNSLYLQMNSLRAEDTALYYCAAAAGSAWYGTLYEYDYWGQGTLVTVSSSGGPGPAGMKGLPGSQTVVTQEPSLTVSPGGTVTLTCGSSTGAVTSGNYPNWVQQKPGQAPRGLIGDYKDDDDKGTPARFSGSLLGGKAALTLSGVQPEDEAEYYCVLWYSNRWVFGGGTKLTVLGGGSGGGSEVQLVESGGGLVQPGGSLKLSCAASGFTFNKYAMNWVRQAPGKGLEWVARIRSKYDYKDDDDKADSVKDRFTISRDDSKNTAYLQMNNLKTEDTAVYYCVRHGNFGNSYISYWAYWGQGTLVTVSSGGGGSGGGSEVQLVESGGGLVQPGNSLRLSCAASGFTFSKFGMSWVRQAPGKGLEWVSSISGSGRDTLYAESVKGRFTISRDNAKTTLYLQMNSLRPEDTAVYYCTIGGSLSVSSQGTLVTVSSHHHHHH

SEQ ID NO: 319 - protein, 885 aa, Artificial Sequence
  Description of Artificial Sequence: Synthetic polypeptide
  Pro471
QVKLVESGGGVVRPGGSLTLSCAASGRTSRSYGMGWFRQAPGKEREFVSGISWRGDSTGYADSVKGRFTISRDNAKNSLYLQMNSLRAEDTALYYCAAAAGSAWYGTLYEYDYWGQGTLVTVSSGGGSGGGSEVQLVESGGGLVQPGGSLKLSCAASGFTFNKYAINWVRQAPGKGLEWVARIRSKYNNYATYYADQVKDRFTISRDDSKNTAYLQMNNLKTEDTAVYYCVRHANFGNSYISYWAYWGQGTLVTVSSGGGSGGGSQTVVTQEPSLTVSPGGTVTLTCASSTGAVTSGNYPNWVQQKPGQAPRGLIGGTKFLVPGTPARFSGSLLGGKAALTLSGVQPEDEAEYYCTLWYSNRWVFGGGTKLTVLGGGSGGGSQVQLVESGGGLVQPGGSLRLSCAASGFTVSNSVMAWYRQTPGNEREFVAIINSIGITNYADSVKGRFTISRDNSKNTLYLQMNSLRAEDTAVYVCNRNFDRIYWGQGTLVTVSSSGGPGPAGMKGLPGSQTVVTQEPSLTVSPGGTVTLTCGSSTGAVTSGNYPNWVQQKPGQAPRGLIGDYKDDDDKGTPARFSGSLLGGKAALTLSGVQPEDEAEYYCVLWYSNRWVFGGGTKLTVLGGGSGGGSEVQLVESGGGLVQPGGSLKLSCAASGFTFNKYAMNWVRQAPGKGLEWVARIRSKYDYKDDDDKADSVKDRFTISRDDSKNTAYLQMNNLKTEDTAVYYCVRHGNFGNSYISYWAYWGQGTLVTVSSGGGGSGGGSEVQLVESGGGLVQPGNSLRLSCAASGFTFSKFGMSWVRQAPGKGLEWVSSISGSGRDTLYAESVKGRFTISRDNAKTTLYLQMNSLRPEDTAVYYCTIGGSLSVSSQGTLVTVSSHHHHHH

SEQ ID NO: 320 - protein, 884 aa, Artificial Sequence
  Description of Artificial Sequence: Synthetic polypeptide
  Pro551
QVKLEESGGGSVQTGGSLRLTCAASGRTSRSYGMGWFRQAPGKEREFVSGISWRGDSTGYADSVKGRFTISRDNAKNTVDLQMNSLKPEDTAIYYCAAAAGSAWYGTLYEYDYWGQGTQVTVSSGGGSGGGSEVQLVESGGGLVQPGGSLKLSCAASGFTFNKYAINWVRQAPGKGLEWVARIRSKYNNYATYYADQVKDRFTISRDDSKNTAYLQMNNLKTEDTAVYYCVRHANFGNSYISYWAYWGQGTLVTVSSGGGSGGGSQTVVTQEPSLTVSPGGTVTLTCASSTGAVTSGNYPNWVQQKPGQAPRGLIGGTKFLVPGTPARFSGSLLGGKAALTLSGVQPEDEAEYYCTLWYSNRWVFGGGTKLTVLGGGSGGGSQVQLVESGGGLVQPGGSLRLSCAAPGNTFSISAMGWYRQAPGKQREWVAVTHSDYSTNYADSVKGRFTISRDNSKNTLYLQMNSLRAEDTAVYYCKHYGIDYWGQGTLVTVSSSGGPGPAGMKGLPGSQTVVTQEPSLTVSPGGTVTLTCGSSTGAVTSGNYPNWVQQKPGQAPRGLIGDYKDDDDKGTPARFSGSLLGGKAALTLSGVQPEDEAEYYCVLWYSNRWVFGGGTKLTVLGGGSGGGSEVQLVESGGGLVQPGGSLKLSCAASGFTFNKYAMNWVRQAPGKGLEWVARIRSKYDYKDDDDKADSVKDRFTISRDDSKNTAYLQMNNLKTEDTAVYYCVRHGNFGNSYISYWAYWGQGTLVTVSSGGGGSGGGSEVQLVESGGGLVQPGNSLRLSCAASGFTFSKFGMSWVRQAPGKGLEWVSSISGSGRDTLYAESVKGRFTISRDNAKTTLYLQMNSLRPEDTAVYYCTIGGSLSVSSQGTLVTVSSHHHHHH

SEQ ID NO: 321 - protein, 884 aa, Artificial Sequence
  Description of Artificial Sequence: Synthetic polypeptide
  Pro552
QVQLVESGGGLVQPGGSLRLSCAAPGNTFSISAMGWYRQAPGKQREWVAVTHSDYSTNYADSVKGRFTISRDNSKNTLYLQMNSLRAEDTAVYYCKHYGIDYWGQGTLVTVSSGGGSGGGSEVQLVESGGGLVQPGGSLKLSCAASGFTFNKYAINWVRQAPGKGLEWVARIRSKYNNYATYYADQVKDRFTISRDDSKNTAYLQMNNLKTEDTAVYYCVRHANFGNSYISYWAYWGQGTLVTVSSGGGSGGGSQTVVTQEPSLTVSPGGTVTLTCASSTGAVTSGNYPNWVQQKPGQAPRGLIGGTKFLVPGTPARFSGSLLGGKAALTLSGVQPEDEAEYYCTLWYSNRWVFGGGTKLTVLGGGSGGGSQVKLEESGGGSVQTGGSLRLTCAASGRTSRSYGMGWFRQAPGKEREFVSGISWRGDSTGYADSVKGRFTISRDNAKNTVDLQMNSLKPEDTAIYYCAAAAGSAWYGTLYEYDYWGQGTQVTVSSSGGPGPAGMKGLPGSQTVVTQEPSLTVSPGGTVTLTCGSSTGAVTSGNYPNWVQQKPGQAPRGLIGDYKDDDDKGTPARFSGSLLGGKAALTLSGVQPEDEAEYYCVLWYSNRWVFGGGTKLTVLGGGSGGGSEVQLVESGGGLVQPGGSLKLSCAASGFTFNKYAMNWVRQAPGKGLEWVARIRSKYDYKDDDDKADSVKDRFTISRDDSKNTAYLQMNNLKTEDTAVYYCVRHGNFGNSYISYWAYWGQGTLVTVSSGGGGSGGGSEVQLVESGGGLVQPGNSLRLSCAASGFTFSKFGMSWVRQAPGKGLEWVSSISGSGRDTLYAESVKGRFTISRDNAKTTLYLQMNSLRPEDTAVYYCTIGGSLSVSSQGTLVTVSSHHHHHH

SEQ ID NO: 322 - protein, 897 aa, Artificial Sequence
  Description of Artificial Sequence: Synthetic polypeptide
  Pro623
QVKLVESGGGVVRPGGSLTLSCAASGRTSRSYGMGWFRQAPGKEREFVSGISWRGDSTGYADSVKGRFTISRDNAKNSLYLQMNSLRAEDTALYYCAAAAGSAWYGTLYEYDYWGQGTLVTVSSGGGSGGGSEVQLVESGGGLVQPGGSLKLSCAASGFTFNKYAINWVRQAPGKGLEWVARIRSKYNNYATYYADQVKDRFTISRDDSKNTAYLQMNNLKTEDTAVYYCVRHANFGNSYISYWAYWGQGTLVTVSSGGGSGGGSQTVVTQEPSLTVSPGGTVTLTCASSTGAVTSGNYPNWVQQKPGQAPRGLIGGTKFLVPGTPARFSGSLLGGKAALTLSGVQPEDEAEYYCTLWYSNRWVFGGGTKLTVLGGGSGGGSQVQLLESGGGLVQPGGSLRLSCAASGRTLDNYDMGWFRQGPGKEREFVAAISWSGGSTDYAYSVKGRFTISRDNSKNTLYLQMNSLRAEDTAVYYCAADLRFTGGDTMTPETYDYWGQGTLVTVSSSGGPGPAGMKGLPGSQTVVTQEPSLTVSPGGTVTLTCGSSTGAVTSGNYPNWVQQKPGQAPRGLIGDYKDDDDKGTPARFSGSLLGGKAALTLSGVQPEDEAEYYCVLWYSNRWVFGGGTKLTVLGGGSGGGSEVQLVESGGGLVQPGGSLKLSCAASGFTFNKYAMNWVRQAPGKGLEWVARIRSKYDYKDDDDKADSVKDRFTISRDDSKNTAYLQMNNLKTEDTAVYYCVRHGNFGNSYISYWAYWGQGTLVTVSSGGGGSGGGSEVQLVESGGGLVQPGNSLRLSCAASGFTFSKFGMSWVRQAPGKGLEWVSSISGSGRDTLYAESVKGRFTISRDNAKTTLYLQMNSLRPEDTAVYYCTIGGSLSVSSQGTLVTVSSHHHHHH

SEQ ID NO: 323 - protein, 897 aa, Artificial Sequence
  Description of Artificial Sequence: Synthetic polypeptide
  Pro624
QVKLVESGGGVVRPGGSLTLSCAASGRTSRSYGMGWFRQAPGKEREFVSGISWRGDSTGYADSVKGRFTISRDNAKNSLYLQMNSLRAEDTALYYCAAAAGSAWYGTLYEYDYWGQGTLVTVSSGGGSGGGSEVQLVESGGGLVQPGGSLKLSCAASGFTFNKYAINWVRQAPGKGLEWVARIRSKYNNYATYYADQVKDRFTISRDDSKNTAYLQMNNLKTEDTAVYYCVRHANFGNSYISYWAYWGQGTLVTVSSGGGSGGGSQTVVTQEPSLTVSPGGTVTLTCASSTGAVTSGNYPNWVQQKPGQAPRGLIGGTKFLVPGTPARFSGSLLGGKAALTLSGVQPEDEAEYYCTLWYSNRWVFGGGTKLTVLGGGSGGGSQVQLLESGGGLVQPGGSLRLSCAASGRTFSDYDMGWFRQGPGKEREFVAAISWSGGHTNYADSVKGRFTISRDNSKNTLYLQMNSLRAEDTAVYYCAADLRFTGGDTTTPETYDYWGQGTLVTVSSSGGPGPAGMKGLPGSQTVVTQEPSLTVSPGGTVTLTCGSSTGAVTSGNYPNWVQQKPGQAPRGLIGDYKDDDDKGTPARFSGSLLGGKAALTLSGVQPEDEAEYYCVLWYSNRWVFGGGTKLTVLGGGSGGGSEVQLVESGGGLVQPGGSLKLSCAASGFTFNKYAMNWVRQAPGKGLEWVARIRSKYDYKDDDDKADSVKDRFTISRDDSKNTAYLQMNNLKTEDTAVYYCVRHGNFGNSYISYWAYWGQGTLVTVSSGGGGSGGGSEVQLVESGGGLVQPGNSLRLSCAASGFTFSKFGMSWVRQAPGKGLEWVSSISGSGRDTLYAESVKGRFTISRDNAKTTLYLQMNSLRPEDTAVYYCTIGGSLSVSSQGTLVTVSSHHHHHH

SEQ ID NO: 324 - protein, 897 aa, Artificial Sequence
  Description of Artificial Sequence: Synthetic polypeptide
  Pro698
QVQLLESGGGLVQPGGSLRLSCAASGRTFSDYDMGWFRQGPGKEREFVAAISWSGGHTNYADSVKGRFTISRDNSKNTLYLQMNSLRAEDTAVYYCAADLRFTGGDTTTPETYDYWGQGTLVTVSSGGGSGGGSEVQLVESGGGLVQPGGSLKLSCAASGFTFNKYAINWVRQAPGKGLEWVARIRSKYNNYATYYADQVKDRFTISRDDSKNTAYLQMNNLKTEDTAVYYCVRHANFGNSYISYWAYWGQGTLVTVSSGGGSGGGSQTVVTQEPSLTVSPGGTVTLTCASSTGAVTSGNYPNWVQQKPGQAPRGLIGGTKFLVPGTPARFSGSLLGGKAALTLSGVQPEDEAEYYCTLWYSNRWVFGGGTKLTVLGGGSGGGSQVKLVESGGGVVRPGGSLTLSCAASGRTSRSYGMGWFRQAPGKEREFVSGISWRGDSTGYADSVKGRFTISRDNAKNSLYLQMNSLRAEDTALYYCAAAAGSAWYGTLYEYDYWGQGTLVTVSSSGGPGPAGMKGLPGSQTVVTQEPSLTVSPGGTVTLTCGSSTGAVTSGNYPNWVQQKPGQAPRGLIGDYKDDDDKGTPARFSGSLLGGKAALTLSGVQPEDEAEYYCVLWYSNRWVFGGGTKLTVLGGGSGGGSEVQLVESGGGLVQPGGSLKLSCAASGFTFNKYAMNWVRQAPGKGLEWVARIRSKYDYKDDDDKADSVKDRFTISRDDSKNTAYLQMNNLKTEDTAVYYCVRHGNFGNSYISYWAYWGQGTLVTVSSGGGGSGGGSEVQLVESGGGLVQPGNSLRLSCAASGFTFSKFGMSWVRQAPGKGLEWVSSISGSGRDTLYAESVKGRFTISRDNAKTTLYLQMNSLRPEDTAVYYCTIGGSLSVSSQGTLVTVSSHHHHHH

SEQ ID NO: 325 - protein, 897 aa, Artificial Sequence
  Description of Artificial Sequence: Synthetic polypeptide
  Pro655
QVQLQESGGGLVQPGGSLRLSCAPSRRTFHTYHMGWFRQAPGKEREFVAVINWSGGSTVYADSVKGRFTISRDNSKNTLYLQMNSLRAEDTAVYYCAAGGATTQRATEASYDYWGQGTLVTVSSGGGSGGGSEVQLVESGGGLVQPGGSLKLSCAASGFTFNKYAINWVRQAPGKGLEWVARIRSKYNNYATYYADQVKDRFTISRDDSKNTAYLQMNNLKTEDTAVYYCVRHANFGNSYISYWAYWGQGTLVTVSSGGGSGGGSQTVVTQEPSLTVSPGGTVTLTCASSTGAVTSGNYPNWVQQKPGQAPRGLIGGTKFLVPGTPARFSGSLLGGKAALTLSGVQPEDEAEYYCTLWYSNRWVFGGGTKLTVLGGGSGGGSQVQLLESGGGLVQPGGSLRLSCAASGRTLDNYDMGWFRQGPGKEREFVAAISWSGGSTDYAYSVKGRFTISRDNSKNTLYLQMNSLRAEDTAVYYCAADLRFTGGDTMTPETYDYWGQGTLVTVSSSGGPGPAGMKGLPGSQTVVTQEPSLTVSPGGTVTLTCGSSTGAVTSGNYPNWVQQKPGQAPRGLIGDYKDDDDKGTPARFSGSLLGGKAALTLSGVQPEDEAEYYCVLWYSNRWVFGGGTKLTVLGGGSGGGSEVQLVESGGGLVQPGGSLKLSCAASGFTFNKYAMNWVRQAPGKGLEWVARIRSKYDYKDDDDKADSVKDRFTISRDDSKNTAYLQMNNLKTEDTAVYYCVRHGNFGNSYISYWAYWGQGTLVTVSSGGGGSGGGSEVQLVESGGGLVQPGNSLRLSCAASGFTFSKFGMSWVRQAPGKGLEWVSSISGSGRDTLYAESVKGRFTISRDNAKTTLYLQMNSLRPEDTAVYYCTIGGSLSVSSQGTLVTVSSHHHHHH

SEQ ID NO: 326 - protein, 897 aa, Artificial Sequence
  Description of Artificial Sequence: Synthetic polypeptide
  Pro656
QVQLQESGGGLVQPGGSLRLSCAPSRRTFHTYHMGWFRQAPGKEREFVAVINWSGGSTVYADSVKGRFTISRDNSKNTLYLQMNSLRAEDTAVYYCAAGGATTQRATEASYDYWGQGTLVTVSSGGGSGGGSEVQLVESGGGLVQPGGSLKLSCAASGFTFNKYAINWVRQAPGKGLEWVARIRSKYNNYATYYADQVKDRFTISRDDSKNTAYLQMNNLKTEDTAVYYCVRHANFGNSYISYWAYWGQGTLVTVSSGGGSGGGSQTVVTQEPSLTVSPGGTVTLTCASSTGAVTSGNYPNWVQQKPGQAPRGLIGGTKFLVPGTPARFSGSLLGGKAALTLSGVQPEDEAEYYCTLWYSNRWVFGGGTKLTVLGGGSGGGSQVQLLESGGGLVQPGGSLRLSCAASGRTFSDYDMGWFRQGPGKEREFVAAISWSGGHTNYADSVKGRFTISRDNSKNTLYLQMNSLRAEDTAVYYCAADLRFTGGDTTTPETYDYWGQGTLVTVSSSGGPGPAGMKGLPGSQTVVTQEPSLTVSPGGTVTLTCGSSTGAVTSGNYPNWVQQKPGQAPRGLIGDYKDDDDKGTPARFSGSLLGGKAALTLSGVQPEDEAEYYCVLWYSNRWVFGGGTKLTVLGGGSGGGSEVQLVESGGGLVQPGGSLKLSCAASGFTFNKYAMNWVRQAPGKGLEWVARIRSKYDYKDDDDKADSVKDRFTISRDDSKNTAYLQMNNLKTEDTAVYYCVRHGNFGNSYISYWAYWGQGTLVTVSSGGGGSGGGSEVQLVESGGGLVQPGNSLRLSCAASGFTFSKFGMSWVRQAPGKGLEWVSSISGSGRDTLYAESVKGRFTISRDNAKTTLYLQMNSLRPEDTAVYYCTIGGSLSVSSQGTLVTVSSHHHHHH

SEQ ID NO: 327 - protein, 897 aa, Artificial Sequence
  Description of Artificial Sequence: Synthetic polypeptide
  Pro657
QVQLLESGGGLVQPGGSLRLSCAASGRTLDNYDMGWFRQGPGKEREFVAAISWSGGSTDYAYSVKGRFTISRDNSKNTLYLQMNSLRAEDTAVYYCAADLRFTGGDTMTPETYDYWGQGTLVTVSSGGGSGGGSEVQLVESGGGLVQPGGSLKLSCAASGFTFNKYAINWVRQAPGKGLEWVARIRSKYNNYATYYADQVKDRFTISRDDSKNTAYLQMNNLKTEDTAVYYCVRHANFGNSYISYWAYWGQGTLVTVSSGGGSGGGSQTVVTQEPSLTVSPGGTVTLTCASSTGAVTSGNYPNWVQQKPGQAPRGLIGGTKFLVPGTPARFSGSLLGGKAALTLSGVQPEDEAEYYCTLWYSNRWVFGGGTKLTVLGGGSGGGSQVQLQESGGGLVQPGGSLRLSCAPSRRTFHTYHMGWFRQAPGKEREFVAVINWSGGSTVYADSVKGRFTISRDNSKNTLYLQMNSLRAEDTAVYYCAAGGATTQRATEASYDYWGQGTLVTVSSSGGPGPAGMKGLPGSQTVVTQEPSLTVSPGGTVTLTCGSSTGAVTSGNYPNWVQQKPGQAPRGLIGDYKDDDDKGTPARFSGSLLGGKAALTLSGVQPEDEAEYYCVLWYSNRWVFGGGTKLTVLGGGSGGGSEVQLVESGGGLVQPGGSLKLSCAASGFTFNKYAMNWVRQAPGKGLEWVARIRSKYDYKDDDDKADSVKDRFTISRDDSKNTAYLQMNNLKTEDTAVYYCVRHGNFGNSYISYWAYWGQGTLVTVSSGGGGSGGGSEVQLVESGGGLVQPGNSLRLSCAASGFTFSKFGMSWVRQAPGKGLEWVSSISGSGRDTLYAESVKGRFTISRDNAKTTLYLQMNSLRPEDTAVYYCTIGGSLSVSSQGTLVTVSSHHHHHH

SEQ ID NO: 328 - protein, 897 aa, Artificial Sequence
  Description of Artificial Sequence: Synthetic polypeptide
  Pro658
QVQLLESGGGLVQPGGSLRLSCAASGRTFSDYDMGWFRQGPGKEREFVAAISWSGGHTNYADSVKGRFTISRDNSKNTLYLQMNSLRAEDTAVYYCAADLRFTGGDTTTPETYDYWGQGTLVTVSSGGGSGGGSEVQLVESGGGLVQPGGSLKLSCAASGFTFNKYAINWVRQAPGKGLEWVARIRSKYNNYATYYADQVKDRFTISRDDSKNTAYLQMNNLKTEDTAVYYCVRHANFGNSYISYWAYWGQGTLVTVSSGGGSGGGSQTVVTQEPSLTVSPGGTVTLTCASSTGAVTSGNYPNWVQQKPGQAPRGLIGGTKFLVPGTPARFSGSLLGGKAALTLSGVQPEDEAEYYCTLWYSNRWVFGGGTKLTVLGGGSGGGSQVQLQESGGGLVQPGGSLRLSCAPSRRTFHTYHMGWFRQAPGKEREFVAVINWSGGSTVYADSVKGRFTISRDNSKNTLYLQMNSLRAEDTAVYYCAAGGATTQRATEASYDYWGQGTLVTVSSSGGPGPAGMKGLPGSQTVVTQEPSLTVSPGGTVTLTCGSSTGAVTSGNYPNWVQQKPGQAPRGLIGDYKDDDDKGTPARFSGSLLGGKAALTLSGVQPEDEAEYYCVLWYSNRWVFGGGTKLTVLGGGSGGGSEVQLVESGGGLVQPGGSLKLSCAASGFTFNKYAMNWVRQAPGKGLEWVARIRSKYDYKDDDDKADSVKDRFTISRDDSKNTAYLQMNNLKTEDTAVYYCVRHGNFGNSYISYWAYWGQGTLVTVSSGGGGSGGGSEVQLVESGGGLVQPGNSLRLSCAASGFTFSKFGMSWVRQAPGKGLEWVSSISGSGRDTLYAESVKGRFTISRDNAKTTLYLQMNSLRPEDTAVYYCTIGGSLSVSSQGTLVTVSSHHHHHH

SEQ ID NO: 329 - protein, 885 aa, Artificial Sequence
  Description of Artificial Sequence: Synthetic polypeptide
  Pro516
QVQLVESGGGLVQPGGSLRLSCAASGSALIINAMGWYRQAPGKQRELVATVTRSGRTNYADSVKGRFTISRDNSKNTLYLQMNSLRAEDTAVYYCNVALWIADGEYDYWGQGTLVTVSSGGGSGGGSEVQLVESGGGLVQPGGSLKLSCAASGFTFNKYAINWVRQAPGKGLEWVARIRSKYNNYATYYADQVKDRFTISRDDSKNTAYLQMNNLKTEDTAVYYCVRHANFGNSYISYWAYWGQGTLVTVSSGGGSGGGSQTVVTQEPSLTVSPGGTVTLTCASSTGAVTSGNYPNWVQQKPGQAPRGLIGGTKFLVPGTPARFSGSLLGGKAALTLSGVQPEDEAEYYCTLWYSNRWVFGGGTKLTVLGGGSGGGSQVQLVESGGGLVQPGGSLRLSCAASGSALIINAMGWYRQAPGKQRELVATVTRSGRTNYADSVKGRFTISRDNSKNTLYLQMNSLRAEDTAVYYCNVALWIADGEYDYWGQGTLVTVSSSGGPGPAGMKGLPGSQTVVTQEPSLTVSPGGTVTLTCGSSTGAVTSGNYPNWVQQKPGQAPRGLIGDYKDDDDKGTPARFSGSLLGGKAALTLSGVQPEDEAEYYCVLWYSNRWVFGGGTKLTVLGGGSGGGSEVQLVESGGGLVQPGGSLKLSCAASGFTFNKYAMNWVRQAPGKGLEWVARIRSKYDYKDDDDKADSVKDRFTISRDDSKNTAYLQMNNLKTEDTAVYYCVRHGNFGNSYISYWAYWGQGTLVTVSSGGGGSGGGSEVQLVESGGGLVQPGNSLRLSCAASGFTFSKFGMSWVRQAPGKGLEWVSSISGSGRDTLYAESVKGRFTISRDNAKTTLYLQMNSLRPEDTAVYYCTIGGSLSVSSQGTLVTVSSHHHHHH

SEQ ID NO: 330 - protein, 879 aa, Artificial Sequence
  Description of Artificial Sequence: Synthetic polypeptide
  Pro517
QVQLVESGGGLVQPGGSLRLSCAASGNIFIINVMGWYRQAPGKQRELVATITNGGRTHYADSVKGRFTISRDNSKNTLYLQMNSLRAEDTAVYYCNANHIELGDYWGQGTLVTVSSGGGSGGGSEVQLVESGGGLVQPGGSLKLSCAASGFTFNKYAINWVRQAPGKGLEWVARIRSKYNNYATYYADQVKDRFTISRDDSKNTAYLQMNNLKTEDTAVYYCVRHANFGNSYISYWAYWGQGTLVTVSSGGGSGGGSQTVVTQEPSLTVSPGGTVTLTCASSTGAVTSGNYPNWVQQKPGQAPRGLIGGTKFLVPGTPARFSGSLLGGKAALTLSGVQPEDEAEYYCTLWYSNRWVFGGGTKLTVLGGGSGGGSQVQLVESGGGLVQPGGSLRLSCAASGNIFIINVMGWYRQAPGKQRELVATITNGGRTHYADSVKGRFTISRDNSKNTLYLQMNSLRAEDTAVYYCNANHIELGDYWGQGTLVTVSSSGGPGPAGMKGLPGSQTVVTQEPSLTVSPGGTVTLTCGSSTGAVTSGNYPNWVQQKPGQAPRGLIGDYKDDDDKGTPARFSGSLLGGKAALTLSGVQPEDEAEYYCVLWYSNRWVFGGGTKLTVLGGGSGGGSEVQLVESGGGLVQPGGSLKLSCAASGFTFNKYAMNWVRQAPGKGLEWVARIRSKYDYKDDDDKADSVKDRFTISRDDSKNTAYLQMNNLKTEDTAVYYCVRHGNFGNSYISYWAYWGQGTLVTVSSGGGGSGGGSEVQLVESGGGLVQPGNSLRLSCAASGFTFSKFGMSWVRQAPGKGLEWVSSISGSGRDTLYAESVKGRFTISRDNAKTTLYLQMNSLRPEDTAVYYCTIGGSLSVSSQGTLVTVSSHHHHHH

SEQ ID NO: 331 - protein, 877 aa, Artificial Sequence
  Description of Artificial Sequence: Synthetic polypeptide
  Pro518
QVQLVESGGGLVQPGGSLRLSCTASGIIFSVYDMGWYRQTPGKQREFVARITAGGGTYLTDSVKGRFTISRDNSKNTLYLQMNSLRAEDTGVYYCNAAWIGDDYWGQGTLVTVSSGGGSGGGSEVQLVESGGGLVQPGGSLKLSCAASGFTFNKYAINWVRQAPGKGLEWVARIRSKYNNYATYYADQVKDRFTISRDDSKNTAYLQMNNLKTEDTAVYYCVRHANFGNSYISYWAYWGQGTLVTVSSGGGSGGGSQTVVTQEPSLTVSPGGTVTLTCASSTGAVTSGNYPNWVQQKPGQAPRGLIGGTKFLVPGTPARFSGSLLGGKAALTLSGVQPEDEAEYYCTLWYSNRWVFGGGTKLTVLGGGSGGGSQVQLVESGGGLVQPGGSLRLSCTASGIIFSVYDMGWYRQTPGKQREFVARITAGGGTYLTDSVKGRFTISRDNSKNTLYLQMNSLRAEDTGVYYCNAAWIGDDYWGQGTLVTVSSSGGPGPAGMKGLPGSQTVVTQEPSLTVSPGGTVTLTCGSSTGAVTSGNYPNWVQQKPGQAPRGLIGDYKDDDDKGTPARFSGSLLGGKAALTLSGVQPEDEAEYYCVLWYSNRWVFGGGTKLTVLGGGSGGGSEVQLVESGGGLVQPGGSLKLSCAASGFTFNKYAMNWVRQAPGKGLEWVARIRSKYDYKDDDDKADSVKDRFTISRDDSKNTAYLQMNNLKTEDTAVYYCVRHGNFGNSYISYWAYWGQGTLVTVSSGGGGSGGGSEVQLVESGGGLVQPGNSLRLSCAASGFTFSKFGMSWVRQAPGKGLEWVSSISGSGRDTLYAESVKGRFTISRDNAKTTLYLQMNSLRPEDTAVYYCTIGGSLSVSSQGTLVTVSSHHHHHH

SEQ ID NO: 332 - protein, 877 aa, Artificial Sequence
  Description of Artificial Sequence: Synthetic polypeptide
  Pro519
QVQLVESGGGLVKPGGSLRLSCAASGITFNLHAMRWYRRAPGKQRELVAYISARDWTNYADSVKGRFTISRDNAKNSLYLQMNSLRAEDTAVYYCNTDLVGEDYWGRGTLVTVSSGGGSGGGSEVQLVESGGGLVQPGGSLKLSCAASGFTFNKYAINWVRQAPGKGLEWVARIRSKYNNYATYYADQVKDRFTISRDDSKNTAYLQMNNLKTEDTAVYYCVRHANFGNSYISYWAYWGQGTLVTVSSGGGSGGGSQTVVTQEPSLTVSPGGTVTLTCASSTGAVTSGNYPNWVQQKPGQAPRGLIGGTKFLVPGTPARFSGSLLGGKAALTLSGVQPEDEAEYYCTLWYSNRWVFGGGTKLTVLGGGSGGGSQVQLVESGGGLVKPGGSLRLSCAASGITFNLHAMRWYRRAPGKQRELVAYISARDWTNYADSVKGRFTISRDNAKNSLYLQMNSLRAEDTAVYYCNTDLVGEDYWGRGTLVTVSSSGGPGPAGMKGLPGSQTVVTQEPSLTVSPGGTVTLTCGSSTGAVTSGNYPNWVQQKPGQAPRGLIGDYKDDDDKGTPARFSGSLLGGKAALTLSGVQPEDEAEYYCVLWYSNRWVFGGGTKLTVLGGGSGGGSEVQLVESGGGLVQPGGSLKLSCAASGFTFNKYAMNWVRQAPGKGLEWVARIRSKYDYKDDDDKADSVKDRFTISRDDSKNTAYLQMNNLKTEDTAVYYCVRHGNFGNSYISYWAYWGQGTLVTVSSGGGGSGGGSEVQLVESGGGLVQPGNSLRLSCAASGFTFSKFGMSWVRQAPGKGLEWVSSISGSGRDTLYAESVKGRFTISRDNAKTTLYLQMNSLRPEDTAVYYCTIGGSLSVSSQGTLVTVSSHHHHHH

SEQ ID NO: 333 - protein, 880 aa, Artificial Sequence
  Description of Artificial Sequence: Synthetic polypeptide
  Pro513
QVQLVESGGGLVQPGGSLRLSCAASGNIFIINVMGWYRQAPGKQRELVATITNGGRTHYADSVKGRFTISRDNSKNTLYLQMNSLRAEDTAVYYCNANHIELGDYWGQGTLVTVSSGGGSGGGSEVQLVESGGGLVQPGGSLKLSCAASGFTFNKYAINWVRQAPGKGLEWVARIRSKYNNYATYYADQVKDRFTISRDDSKNTAYLQMNNLKTEDTAVYYCVRHANFGNSYISYWAYWGQGTLVTVSSGGGSGGGSQTVVTQEPSLTVSPGGTVTLTCASSTGAVTSGNYPNWVQQKPGQAPRGLIGGTKFLVPGTPARFSGSLLGGKAALTLSGVQPEDEAEYYCTLWYSNRWVFGGGTKLTVLGGGSGGGSQVQLVESGGGLVQPGGSLRLSCAASGNIFIINVMGWYRQAPGKQRELVATITNGGRTHYADSVKGRFTISRDNSKNTLYLQMNSLRAEDTAVYYCNANHIELGDYWGQGTLVTVSSGGGSGGGSGGGSGGGSQTVVTQEPSLTVSPGGTVTLTCGSSTGAVTSGNYPNWVQQKPGQAPRGLIGDYKDDDDKGTPARFSGSLLGGKAALTLSGVQPEDEAEYYCVLWYSNRWVFGGGTKLTVLGGGSGGGSEVQLVESGGGLVQPGGSLKLSCAASGFTFNKYAMNWVRQAPGKGLEWVARIRSKYDYKDDDDKADSVKDRFTISRDDSKNTAYLQMNNLKTEDTAVYYCVRHGNFGNSYISYWAYWGQGTLVTVSSGGGGSGGGSEVQLVESGGGLVQPGNSLRLSCAASGFTFSKFGMSWVRQAPGKGLEWVSSISGSGRDTLYAESVKGRFTISRDNAKTTLYLQMNSLRPEDTAVYYCTIGGSLSVSSQGTLVTVSSHHHHHH

SEQ ID NO: 334 - protein, 895 aa, Artificial Sequence
  Description of Artificial Sequence: Synthetic polypeptide
  Pro186
QVKLEESGGGSVQTGGSLRLTCAASGRTSRSYGMGWFRQAPGKEREFVSGISWRGDSTGYADSVKGRFTISRDNAKNTVDLQMNSLKPEDTAIYYCAAAAGSAWYGTLYEYDYWGQGTQVTVSSGGGSGGGSEVQLVESGGGLVQPGGSLKLSCAASGFTFNKYAINWVRQAPGKGLEWVARIRSKYNNYATYYADQVKDRFTISRDDSKNTAYLQMNNLKTEDTAVYYCVRHANFGNSYISYWAYWGQGTLVTVSSGGGSGGGSQTVVTQEPSLTVSPGGTVTLTCASSTGAVTSGNYPNWVQQKPGQAPRGLIGGTKFLVPGTPARFSGSLLGGKAALTLSGVQPEDEAEYYCTLWYSNRWVFGGGTKLTVLGGGSGGGSQVKLEESGGGSVQTGGSLRLTCAASGRTSRSYGMGWFRQAPGKEREFVSGISWRGDSTGYADSVKGRFTISRDNAKNTVDLQMNSLKPEDTAIYYCAAAAGSAWYGTLYEYDYWGQGTQVTVSSSGGPGPAGMKGLPGSQTVVTQEPSLTVSPGGTVTLTCGSSTGAVTSGNYPNWVQQKPGQAPRGLIGDYKDDDDKGTPARFSGSLLGGKAALTLSGVQPEDEAEYYCVLWYSNRWVFGGGTKLTVLGGGSGGGSEVQLVESGGGLVQPGGSLKLSCAASGFTFNKYAMNWVRQAPGKGLEWVARIRSKYDYKDDDDKADSVKDRFTISRDDSKNTAYLQMNNLKTEDTAVYYCVRHGNFGNSYISYWAYWGQGTLVTVSSGGGGSGGGSEVQLVESGGGLVQPGNSLRLSCAASGFTFSKFGMSWVRQAPGKGLEWVSSISGSGRDTLYAESVKGRFTISRDNAKTTLYLQMNSLRPEDTAVYYCTIGGSLSVSSQGTLVTVSSHHHHHH

SEQ ID NO: 335 - protein, 895 aa, Artificial Sequence
  Description of Artificial Sequence: Synthetic polypeptide
  Pro214
QVKLEESGGGSVQTGGSLRLTCAASGRTSRSYGMGWFRQAPGKEREFVSGISWRGDSTGYADSVKGRFTISRDNAKNTVDLQMNSLKPEDTAIYYCAAAAGSAWYGTLYEYDYWGQGTQVTVSSGGGSGGGSEVQLVESGGGLVQPGGSLKLSCAASGFTFNKYAINWVRQAPGKGLEWVARIRSKYNNYATYYADQVKDRFTISRDDSKNTAYLQMNNLKTEDTAVYYCVRHANFGNSYISYWAYWGQGTLVTVSSGGGSGGGSQTVVTQEPSLTVSPGGTVTLTCASSTGAVTSGNYPNWVQQKPGQAPRGLIGGTKFLVPGTPARFSGSLLGGKAALTLSGVQPEDEAEYYCTLWYSNRWVFGGGTKLTVLGGGSGGGSQVKLEESGGGSVQTGGSLRLTCAASGRTSRSYGMGWFRQAPGKEREFVSGISWRGDSTGYADSVKGRFTISRDNAKNTVDLQMNSLKPEDTAIYYCAAAAGSAWYGTLYEYDYWGQGTQVTVSSGGGGSGGGGSGGGGSQTVVTQEPSLTVSPGGTVTLTCGSSTGAVTSGNYPNWVQQKPGQAPRGLIGDYKDDDDKGTPARFSGSLLGGKAALTLSGVQPEDEAEYYCVLWYSNRWVFGGGTKLTVLGGGSGGGSEVQLVESGGGLVQPGGSLKLSCAASGFTFNKYAMNWVRQAPGKGLEWVARIRSKYDYKDDDDKADSVKDRFTISRDDSKNTAYLQMNNLKTEDTAVYYCVRHGNFGNSYISYWAYWGQGTLVTVSSGGGGSGGGSEVQLVESGGGLVQPGNSLRLSCAASGFTFSKFGMSWVRQAPGKGLEWVSSISGSGRDTLYAESVKGRFTISRDNAKTTLYLQMNSLRPEDTAVYYCTIGGSLSVSSQGTLVTVSSHHHHHH

SEQ ID NO: 336 - protein, 895 aa, Artificial Sequence
  Description of Artificial Sequence: Synthetic polypeptide
  Pro225
QVQLQESGGGLVQPGGSLRLSCAPSRRTFHTYHMGWFRQAPGKEREFVAVINWSGGSTVYADSVKGRFTISRDNSKNTLYLQMNSLRAEDTAVYYCAAGGATTQRATEASYDYWGQGTLVTVSSGGGSGGGSEVQLVESGGGLVQPGGSLKLSCAASGFTFNKYAINWVRQAPGKGLEWVARIRSKYNNYATYYADQVKDRFTISRDDSKNTAYLQMNNLKTEDTAVYYCVRHANFGNSYISYWAYWGQGTLVTVSSGGGSGGGSQTVVTQEPSLTVSPGGTVTLTCASSTGAVTSGNYPNWVQQKPGQAPRGLIGGTKFLVPGTPARFSGSLLGGKAALTLSGVQPEDEAEYYCTLWYSNRWVFGGGTKLTVLGGGSGGGSQVQLQESGGGLVQPGGSLRLSCAPSRRTFHTYHMGWFRQAPGKEREFVAVINWSGGSTVYADSVKGRFTISRDNSKNTLYLQMNSLRAEDTAVYYCAAGGATTQRATEASYDYWGQGTLVTVSSSGGPGPAGMKGLPGSQTVVTQEPSLTVSPGGTVTLTCGSSTGAVTSGNYPNWVQQKPGQAPRGLIGDYKDDDDKGTPARFSGSLLGGKAALTLSGVQPEDEAEYYCVLWYSNRWVFGGGTKLTVLGGGSGGGSEVQLVESGGGLVQPGGSLKLSCAASGFTFNKYAMNWVRQAPGKGLEWVARIRSKYDYKDDDDKADSVKDRFTISRDDSKNTAYLQMNNLKTEDTAVYYCVRHGNFGNSYISYWAYWGQGTLVTVSSGGGGSGGGSEVQLVESGGGLVQPGNSLRLSCAASGFTFSKFGMSWVRQAPGKGLEWVSSISGSGRDTLYAESVKGRFTISRDNAKTTLYLQMNSLRPEDTAVYYCTIGGSLSVSSQGTLVTVSSHHHHHH

SEQ ID NO: 337 - protein, 895 aa, Artificial Sequence
  Description of Artificial Sequence: Synthetic polypeptide
  Pro295
QVQLQESGGGLVQPGGSLRLSCAPSRRTFHTYHMGWFRQAPGKEREFVAVINWSGGSTVYADSVKGRFTISRDNSKNTLYLQMNSLRAEDTAVYYCAAGGATTQRATEASYDYWGQGTLVTVSSGGGSGGGSEVQLVESGGGLVQPGGSLKLSCAASGFTFNKYAINWVRQAPGKGLEWVARIRSKYNNYATYYADQVKDRFTISRDDSKNTAYLQMNNLKTEDTAVYYCVRHANFGNSYISYWAYWGQGTLVTVSSGGGSGGGSQTVVTQEPSLTVSPGGTVTLTCASSTGAVTSGNYPNWVQQKPGQAPRGLIGGTKFLVPGTPARFSGSLLGGKAALTLSGVQPEDEAEYYCTLWYSNRWVFGGGTKLTVLGGGSGGGSQVQLQESGGGLVQPGGSLRLSCAPSRRTFHTYHMGWFRQAPGKEREFVAVINWSGGSTVYADSVKGRFTISRDNSKNTLYLQMNSLRAEDTAVYYCAAGGATTQRATEASYDYWGQGTLVTVSSGGGGSGGGGSGGGGSQTVVTQEPSLTVSPGGTVTLTCGSSTGAVTSGNYPNWVQQKPGQAPRGLIGDYKDDDDKGTPARFSGSLLGGKAALTLSGVQPEDEAEYYCVLWYSNRWVFGGGTKLTVLGGGSGGGSEVQLVESGGGLVQPGGSLKLSCAASGFTFNKYAMNWVRQAPGKGLEWVARIRSKYDYKDDDDKADSVKDRFTISRDDSKNTAYLQMNNLKTEDTAVYYCVRHGNFGNSYISYWAYWGQGTLVTVSSGGGGSGGGSEVQLVESGGGLVQPGNSLRLSCAASGFTFSKFGMSWVRQAPGKGLEWVSSISGSGRDTLYAESVKGRFTISRDNAKTTLYLQMNSLRPEDTAVYYCTIGGSLSVSSQGTLVTVSSHHHHHH

SEQ ID NO: 338 - protein, 1359 aa, Artificial Sequence
  Description of Artificial Sequence: Synthetic polypeptide
  Pro 817
QVKLEESGGGSVQTGGSLRLTCAASGRTSRSYGMGWFRQAPGKEREFVSGISWRGDSTGYADSVKGRFTISRDNAKNTVDLQMNSLKPEDTAIYYCAAAAGSAWYGTLYEYDYWGQGTQVTVSSGGGSGGGSEVQLVESGGGLVQPGGSLKLSCAASGFTFNKYAINWVRQAPGKGLEWVARIRSKYNNYATYYADQVKDRFTISRDDSKNTAYLQMNNLKTEDTAVYYCVRHANFGNSYISYWAYWGQGTLVTVSSGGGSGGGSQTVVTQEPSLTVSPGGTVTLTCASSTGAVTSGNYPNWVQQKPGQAPRGLIGGTKFLVPGTPARFSGSLLGGKAALTLSGVQPEDEAEYYCTLWYSNRWVFGGGTKLTVLGGGSGGGSQVKLEESGGGSVQTGGSLRLTCAASGRTSRSYGMGWFRQAPGKEREFVSGISWRGDSTGYADSVKGRFTISRDNAKNTVDLQMNSLKPEDTAIYYCAAAAGSAWYGTLYEYDYWGQGTQVTVSSSGGPGPAGMKGLPGSQTVVTQEPSLTVSPGGTVTLTCGSSTGAVTSGNYPNWVQQKPGQAPRGLIGDYKDDDDKGTPARFSGSLLGGKAALTLSGVQPEDEAEYYCVLWYSNRWVFGGGTKLTVLGGGSGGGSEVQLVESGGGLVQPGGSLKLSCAASGFTFNKYAMNWVRQAPGKGLEWVARIRSKYDYKDDDDKADSVKDRFTISRDDSKNTAYLQMNNLKTEDTAVYYCVRHGNFGNSYISYWAYWGQGTLVTVSSGGGGSGGGSDAHKSEVAHRFKDLGEENFKALVLIAFAQYLQQCPFEDHVKLVNEVTEFAKTCVADESAENCDKSLHTLFGDKLCTVATLRETYGEMADCCAKQEPERNECFLQHKDDNPNLPRLVRPEVDVMCTAFHDNEETFLKKYLYEIARRHPYFYAPELLFFAKRYKAAFTECCQAADKAACLLPKLDELRDEGKASSAKQRLKCASLQKFGERAFKAWAVARLSQRFPKAEFAEVSKLVTDLTKVHTECCHGDLLECADDRADLAKYICENQDSISSKLKECCEKPLLEKSHCIAEVENDEMPADLPSLAADFVESKDVCKNYAEAKDVFLGMFLYEYARRHPDYSVVLLLRLAKTYKTTLEKCCAAADPHECYAKVFDEFKPLVEEPQNLIKQNCELFEQLGEYKFQNALLVRYTKKVPQVSTPTLVEVSRNLGKVGSKCCKHPEAKRMPCAEDYLSVVLNQLCVLHEKTPVSDRVTKCCTESLVNRRPCFSALEVDETYVPKEFNAETFTFHADICTLSEKERQIKKQTALVELVKHKPKATKEQLKAVMDDFAAFVEKCCKADDKETCFAEEGKKLVAASRAALGL

SEQ ID NO: 339 - protein, 8 aa, Artificial Sequence
  Description of Artificial Sequence: Synthetic peptide
  MMP 2/9
GPAGMKGL

SEQ ID NO: 340 - protein, 15 aa, Artificial Sequence
  Description of Artificial Sequence: Synthetic peptide
  MMP 2/9
SGGPGPAGMKGLPGS

SEQ ID NO: 341 - protein, 17 aa, Artificial Sequence
  Description of Artificial Sequence: Synthetic peptide
  MMP 2/9
SGGGPGPAGMKGLPGGS

SEQ ID NO: 342 - protein, 16 aa, Artificial Sequence
  Description of Artificial Sequence: Synthetic peptide
  Meprin A/B
GGGGKKLADEPEGGGS

SEQ ID NO: 343 - protein, 15 aa, Artificial Sequence
  Description of Artificial Sequence: Synthetic peptide
  Meprin A/B
SGGGKKLADEPEGGS

SEQ ID NO: 344 - protein, 8 aa, Artificial Sequence
  Description of Artificial Sequence: Synthetic peptide
  Meprin A/B
KKLADEPE

SEQ ID NO: 345 - protein, 13 aa, Artificial Sequence
  Description of Artificial Sequence: Synthetic peptide
  Meprin A/B (Variant, high efficiency)
GGGKFLADEPEGG

SEQ ID NO: 346 - protein, 15 aa, Artificial Sequence
  Description of Artificial Sequence: Synthetic peptide
  Cathepsin S, K, L
GGGARLQSAAPGGGS

SEQ ID NO: 347 - protein, 16 aa, Artificial Sequence
  Description of Artificial Sequence: Synthetic peptide
  Cathepsin S, K, L
SGGGARLQSAAPGGGS

SEQ ID NO: 348 - protein, 8 aa, Artificial Sequence
  Description of Artificial Sequence: Synthetic peptide
  Cathepsin S, K, L
ARLQSAAP

SEQ ID NO: 349 - protein, 18 aa, Artificial Sequence
  Description of Artificial Sequence: Synthetic peptide
  Meprin/Granzyme B
SGGGGVYADSLEDGGGGS

SEQ ID NO: 350 - protein, 10 aa, Artificial Sequence
  Description of Artificial Sequence: Synthetic peptide
  Meprin/Granzyme B
GVYADSLEDG

SEQ ID NO: 351 - protein, 16 aa, Artificial Sequence
  Description of Artificial Sequence: Synthetic peptide
  Matriptase/uPA (MS)
GGGSLSGRSDNHGGGS

SEQ ID NO: 352 - protein, 10 aa, Artificial Sequence
  Description of Artificial Sequence: Synthetic peptide
  Matriptase/uPA (MS)
GLSGRSDNHG

SEQ ID NO: 353 - protein, 17 aa, Artificial Sequence
  Description of Artificial Sequence: Synthetic peptide
  Matriptase (MV)
SGGGSFTRQARVVGGGS

SEQ ID NO: 354 - protein, 9 aa, Artificial Sequence
  Description of Artificial Sequence: Synthetic peptide
  Matriptase (MV)
SFTRQARVV

SEQ ID NO: 355 - protein, 14 aa, Artificial Sequence
  Description of Artificial Sequence: Synthetic peptide
  CathepsinS/MMP9/Meprin A
ARLQSAAPAGLKGA

SEQ ID NO: 356 - protein, 16 aa, Artificial Sequence
  Description of Artificial Sequence: Synthetic peptide
  CathepsinS/MMP9/Meprin A
GARLQSAAPAGLKGAG

SEQ ID NO: 357 - protein, 13 aa, Artificial Sequence
  Description of Artificial Sequence: Synthetic peptide
  MMP9 (Variant, high efficiency)
GGPGPAGMHGLPG

SEQ ID NO: 358 - protein, 17 aa, Artificial Sequence
  Description of Artificial Sequence: Synthetic peptide
  MMP9 (Variant, high efficiency)
GSGGPGPAGMHGLPGGS

SEQ ID NO: 359 - protein, 13 aa, Artificial Sequence
  Description of Artificial Sequence: Synthetic peptide
  MMP9 (Variant, low efficiency)
GGPGPAGMEGLPG

SEQ ID NO: 360 - protein, 15 aa, Artificial Sequence
  Description of Artificial Sequence: Synthetic peptide
  MMP9-15 (K>E)
SGGPGPAGMEGLPGS

SEQ ID NO: 361 - protein, 15 aa, Artificial Sequence
  Description of Artificial Sequence: Synthetic peptide
  MMP9-15 (M>P)
SGGPGPAGPKGLPGS

SEQ ID NO: 362 - protein, 16 aa, Artificial Sequence
  Description of Artificial Sequence: Synthetic peptide
  Thrombin 1
GGGGLVPRGSLGGGGS

SEQ ID NO: 363 - protein, 15 aa, Artificial Sequence
  Description of Artificial Sequence: Synthetic peptide
  Thrombin 2
SSGGGMPRSFRGGGS

SEQ ID NO: 364 - protein, 16 aa, Artificial Sequence
  Description of Artificial Sequence: Synthetic peptide
  Enterokinase/Flag
GGGGDYKDDDDKGGGS

SEQ ID NO: 365 - protein, 16 aa, Artificial Sequence
  Description of Artificial Sequence: Synthetic peptide
  KLK7-6
SGGGQNPYSAGRGGGS

SEQ ID NO: 366 - protein, 16 aa, Artificial Sequence
  Description of Artificial Sequence: Synthetic peptide
  KLK7-13
SGGGQNPYSAGGGSGG

SEQ ID NO: 367 - protein, 16 aa, Artificial Sequence
  Description of Artificial Sequence: Synthetic peptide
  KLK7-11
SGGGRNVYSAGGGSGG

SEQ ID NO: 368 - protein, 16 aa, Artificial Sequence
  Description of Artificial Sequence: Synthetic peptide
  KLK7-10
SGGGQNTWSAGKGGGS

SEQ ID NO: 369 - protein, 16 aa, Artificial Sequence
  Description of Artificial Sequence: Synthetic peptide
  uPA
GGGSHTGRSAYFGGGS

SEQ ID NO: 370 - protein, 15 aa, Artificial Sequence
  Description of Artificial Sequence: Synthetic peptide
  MMP9-2
SGGPGPAGLKGAPGS

SEQ ID NO: 371 - protein, 8 aa, Artificial Sequence
  Description of Artificial Sequence: Synthetic peptide
  MMP7
KRALGLPG

SEQ ID NO: 372 - protein, 40 aa, Artificial Sequence
  Description of Artificial Sequence: Synthetic polypeptide
  MMP7
DEDEDEDEDEDEDEDERPLALWRSDRDRDRDRDRDRDRDR

SEQ ID NO: 373 - protein, 5 aa, Artificial Sequence
  Description of Artificial Sequence: Synthetic peptide
  MMP9
  MOD_RES (3)..(3): S or T
  MOD_RES (4)..(4): L or I
  MOD_RES (5)..(5): S or T
PRXXX

SEQ ID NO: 374 - protein, 5 aa, Artificial Sequence
  Description of Artificial Sequence: Synthetic peptide
  MMP9
LEATA

SEQ ID NO: 375 - protein, 10 aa, Artificial Sequence
  Description of Artificial Sequence: Synthetic peptide
  MMP11
GGAANLVRGG

SEQ ID NO: 376 - protein, 10 aa, Artificial Sequence
  Description of Artificial Sequence: Synthetic peptide
  MMP14
SGRIGFLRTA

SEQ ID NO: 377 - protein, 6 aa, Artificial Sequence
  Description of Artificial Sequence: Synthetic peptide
  MMP
RLQLKL

SEQ ID NO: 378 - protein, 7 aa, Artificial Sequence
  Description of Artificial Sequence: Synthetic peptide
  MMP
RLQLKAC

SEQ ID NO: 379 - protein, 7 aa, Artificial Sequence
  Description of Artificial Sequence: Synthetic peptide
  MMP2, MMP9, MMP14
  MOD_RES (3)..(3): Cit
  MOD_RES (5)..(5): Hof
EPXGXYL

SEQ ID NO: 380 - protein, 5 aa, Artificial Sequence
  Description of Artificial Sequence: Synthetic peptide
  Urokinase plasminogen activator (upa)
SGRSA

SEQ ID NO: 381 - protein, 4 aa, Artificial Sequence
  Description of Artificial Sequence: Synthetic peptide
  Urokinase plasminogen activator (upa)
DAFK

SEQ ID NO: 382 - protein, 5 aa, Artificial Sequence
  Description of Artificial Sequence: Synthetic peptide
  Urokinase plasminogen activator (upa)
GGGRR

SEQ ID NO: 383 - protein, 4 aa, Artificial Sequence
  Description of Artificial Sequence: Synthetic peptide
  Lysosomal enzyme
GFLG

SEQ ID NO: 384 - protein, 4 aa, Artificial Sequence
  Description of Artificial Sequence: Synthetic peptide
  Lysosomal enzyme
ALAL

SEQ ID NO: 385 - protein, 2 aa, Artificial Sequence
  Description of Artificial Sequence: Synthetic peptide
  Lysosomal enzyme
FK

SEQ ID NO: 386 - protein, 3 aa, Artificial Sequence
  Description of Artificial Sequence: Synthetic peptide
  Cathepsin B
NLL

SEQ ID NO: 387 - protein, 5 aa, Artificial Sequence
  Description of Artificial Sequence: Synthetic peptide
  Cathepsin D
  MOD_RES (3)..(3): Cys(Et)
PICFF

SEQ ID NO: 388 - protein, 8 aa, Artificial Sequence
  Description of Artificial Sequence: Synthetic peptide
  Cathepsin K
GGPRGLPG

SEQ ID NO: 389 - protein, 6 aa, Artificial Sequence
  Description of Artificial Sequence: Synthetic peptide
  Prostate specific antigen
HSSKLQ

SEQ ID NO: 390 - protein, 7 aa, Artificial Sequence
  Description of Artificial Sequence: Synthetic peptide
  Prostate specific antigen
HSSKLQL

SEQ ID NO: 391 - protein, 9 aa, Artificial Sequence
  Description of Artificial Sequence: Synthetic peptide
  Prostate specific antigen
HSSKLQEDA

SEQ ID NO: 392 - protein, 10 aa, Artificial Sequence
  Description of Artificial Sequence: Synthetic peptide
  Herpes simplex virus protease
LVLASSSFGY

SEQ ID NO: 393 - protein, 10 aa, Artificial Sequence
  Description of Artificial Sequence: Synthetic peptide
  HIV protease
GVSQNYPIVG

SEQ ID NO: 394 - protein, 10 aa, Artificial Sequence
  Description of Artificial Sequence: Synthetic peptide
  CMV protease
GVVQASCRLA

SEQ ID NO: 395 - protein, 4 aa, Artificial Sequence
  Description of Artificial Sequence: Synthetic peptide
  Thrombin
  MOD_RES (2)..(2): Pip
FXRS

SEQ ID NO: 396 - protein, 6 aa, Artificial Sequence
  Description of Artificial Sequence: Synthetic peptide
  Thrombin
DPRSFL

SEQ ID NO: 397 - protein, 6 aa, Artificial Sequence
  Description of Artificial Sequence: Synthetic peptide
  Thrombin
PPRSFL

SEQ ID NO: 398 - protein, 4 aa, Artificial Sequence
  Description of Artificial Sequence: Synthetic peptide
  Caspase-3
DEVD

SEQ ID NO: 399 - protein, 5 aa, Artificial Sequence
  Description of Artificial Sequence: Synthetic peptide
  Caspase-3
DEVDP

SEQ ID NO: 400 - protein, 8 aa, Artificial Sequence
  Description of Artificial Sequence: Synthetic peptide
  Caspase-3
KGSGDVEG

SEQ ID NO: 401 - protein, 6 aa, Artificial Sequence
  Description of Artificial Sequence: Synthetic peptide
  Interleukin 1Beta converting enzyme
GWEHDG

SEQ ID NO: 402 - protein, 7 aa, Artificial Sequence
  Description of Artificial Sequence: Synthetic peptide
  Enterokinase
EDDDDKA

SEQ ID NO: 403 - protein, 9 aa, Artificial Sequence
  Description of Artificial Sequence: Synthetic peptide
  Fap
KQEQNPGST

SEQ ID NO: 404 - protein, 6 aa, Artificial Sequence
  Description of Artificial Sequence: Synthetic peptide
  Kallikrein 2
GKAFRR

SEQ ID NO: 405 - protein, 4 aa, Artificial Sequence
  Description of Artificial Sequence: Synthetic peptide
  Plasmin
DAFK

SEQ ID NO: 406 - protein, 4 aa, Artificial Sequence
  Description of Artificial Sequence: Synthetic peptide
  Plasmin
DVLK

SEQ ID NO: 407 - protein, 4 aa, Artificial Sequence
  Description of Artificial Sequence: Synthetic peptide
  Plasmin
DAFK

SEQ ID NO: 408 - protein, 7 aa, Artificial Sequence
  Description of Artificial Sequence: Synthetic peptide
  Top
ALLLALL

SEQ ID NO: 409 - protein, 889 aa, Artificial Sequence
  Description of Artificial Sequence: Synthetic polypeptide
  Pro140 (Format 1)
QVKLEESGGGSVQTGGSLRLTCAASGRTSRSYGMGWFRQAPGKEREFVSGISWRGDSTGYADSVKGRFTISRDNAKNTVDLQMNSLKPEDTAIYYCAAAAGSAWYGTLYEYDYWGQGTQVTVSSGGGSGGGSEVQLVESGGGLVQPGGSLKLSCAASGFTFNKYAINWVRQAPGKGLEWVARIRSKYNNYATYYADQVKDRFTISRDDSKNTAYLQMNNLKTEDTAVYYCVRHANFGNSYISYWAYWGQGTLVTVSSGPAGMKGLQTVVTQEPSLTVSPGGTVTLTCASSTGAVTSGNYPNWVQQKPGQAPRGLIGGTKFLVPGTPARFSGSLLGGKAALTLSGVQPEDEAEYYCTLWYSNRWVFGGGTKLTVLGGGSGGGSQVKLEESGGGSVQTGGSLRLTCAASGRTSRSYGMGWFRQAPGKEREFVSGISWRGDSTGYADSVKGRFTISRDNAKNTVDLQMNSLKPEDTAIYYCAAAAGSAWYGTLYEYDYWGQGTQVTVSSSGGPGPAGMKGLPGSQTVVTQEPSLTVSPGGTVTLTCGSSTGAVTSGNYPNWVQQKPGQAPRGLIGDYKDDDDKGTPARFSGSLLGGKAALTLSGVQPEDEAEYYCVLWYSNRWVFGGGTKLTVLGGGSGGGSEVQLVESGGGLVQPGGSLKLSCAASGFTFNKYAMNWVRQAPGKGLEWVARIRSKYDYKDDDDKADSVKDRFTISRDDSKNTAYLQMNNLKTEDTAVYYCVRHGNFGNSYISYWAYWGQGTLVTVSSGGGGSGGGSEVQLVESGGGLVQPGNSLRLSCAASGFTFSKFGMSWVRQAPGKGLEWVSSISGSGRDTLYAESVKGRFTISRDNAKTTLYLQMNSLRPEDTAVYYCTIGGSLSVSSQGTLVTVSS

SEQ ID NO: 410 - protein, 890 aa, Artificial Sequence
  Description of Artificial Sequence: Synthetic polypeptide
  Pro140b Format 1
QVKLEESGGGSVQTGGSLRLTCAASGRTSRSYGMGWFRQAPGKEREFVSGISWRGDSTGYADSVKGRFTISRDNAKNTVDLQMNSLKPEDTAIYYCAAAAGSAWYGTLYEYDYWGQGTQVTVSSGGGSGGGSEVQLVESGGGLVQPGGSLKLSCAASGFTFNKYAINWVRQAPGKGLEWVARIRSKYNNYATYYADQVKDRFTISRDDSKNTAYLQMNNLKTEDTAVYYCVRHANFGNSYISYWAYWGQGTLVTVSSKKLADEPEQTVVTQEPSLTVSPGGTVTLTCASSTGAVTSGNYPNWVQQKPGQAPRGLIGGTKFLVPGTPARFSGSLLGGKAALTLSGVQPEDEAEYYCTLWYSNRWVFGGGTKLTVLGGGSGGGSQVKLEESGGGSVQTGGSLRLTCAASGRTSRSYGMGWFRQAPGKEREFVSGISWRGDSTGYADSVKGRFTISRDNAKNTVDLQMNSLKPEDTAIYYCAAAAGSAWYGTLYEYDYWGQGTQVTVSSGGGSKKLADEPEGGGSQTVVTQEPSLTVSPGGTVTLTCGSSTGAVTSGNYPNWVQQKPGQAPRGLIGDYKDDDDKGTPARFSGSLLGGKAALTLSGVQPEDEAEYYCVLWYSNRWVFGGGTKLTVLGGGSGGGSEVQLVESGGGLVQPGGSLKLSCAASGFTFNKYAMNWVRQAPGKGLEWVARIRSKYDYKDDDDKADSVKDRFTISRDDSKNTAYLQMNNLKTEDTAVYYCVRHGNFGNSYISYWAYWGQGTLVTVSSGGGGSGGGSEVQLVESGGGLVQPGNSLRLSCAASGFTFSKFGMSWVRQAPGKGLEWVSSISGSGRDTLYAESVKGRFTISRDNAKTTLYLQMNSLRPEDTAVYYCTIGGSLSVSSQGTLVTVSS

SEQ ID NO: 411 - protein, 889 aa, Artificial Sequence
  Description of Artificial Sequence: Synthetic polypeptide
  Pro186 Format 2
QVKLEESGGGSVQTGGSLRLTCAASGRTSRSYGMGWFRQAPGKEREFVSGISWRGDSTGYADSVKGRFTISRDNAKNTVDLQMNSLKPEDTAIYYCAAAAGSAWYGTLYEYDYWGQGTQVTVSSGGGSGGGSEVQLVESGGGLVQPGGSLKLSCAASGFTFNKYAINWVRQAPGKGLEWVARIRSKYNNYATYYADQVKDRFTISRDDSKNTAYLQMNNLKTEDTAVYYCVRHANFGNSYISYWAYWGQGTLVTVSSGGGSGGGSQTVVTQEPSLTVSPGGTVTLTCASSTGAVTSGNYPNWVQQKPGQAPRGLIGGTKFLVPGTPARFSGSLLGGKAALTLSGVQPEDEAEYYCTLWYSNRWVFGGGTKLTVLGGGSGGGSQVKLEESGGGSVQTGGSLRLTCAASGRTSRSYGMGWFRQAPGKEREFVSGISWRGDSTGYADSVKGRFTISRDNAKNTVDLQMNSLKPEDTAIYYCAAAAGSAWYGTLYEYDYWGQGTQVTVSSSGGPGPAGMKGLPGSQTVVTQEPSLTVSPGGTVTLTCGSSTGAVTSGNYPNWVQQKPGQAPRGLIGDYKDDDDKGTPARFSGSLLGGKAALTLSGVQPEDEAEYYCVLWYSNRWVFGGGTKLTVLGGGSGGGSEVQLVESGGGLVQPGGSLKLSCAASGFTFNKYAMNWVRQAPGKGLEWVARIRSKYDYKDDDDKADSVKDRFTISRDDSKNTAYLQMNNLKTEDTAVYYCVRHGNFGNSYISYWAYWGQGTLVTVSSGGGGSGGGSEVQLVESGGGLVQPGNSLRLSCAASGFTFSKFGMSWVRQAPGKGLEWVSSISGSGRDTLYAESVKGRFTISRDNAKTTLYLQMNSLRPEDTAVYYCTIGGSLSVSSQGTLVTVSS

SEQ ID NO: 412 - protein, 890 aa, Artificial Sequence
  Description of Artificial Sequence: Synthetic polypeptide
  Pro187 Format 2
QVKLEESGGGSVQTGGSLRLTCAASGRTSRSYGMGWFRQAPGKEREFVSGISWRGDSTGYADSVKGRFTISRDNAKNTVDLQMNSLKPEDTAIYYCAAAAGSAWYGTLYEYDYWGQGTQVTVSSGGGSGGGSEVQLVESGGGLVQPGGSLKLSCAASGFTFNKYAINWVRQAPGKGLEWVARIRSKYNNYATYYADQVKDRFTISRDDSKNTAYLQMNNLKTEDTAVYYCVRHANFGNSYISYWAYWGQGTLVTVSSGGGSGGGSQTVVTQEPSLTVSPGGTVTLTCASSTGAVTSGNYPNWVQQKPGQAPRGLIGGTKFLVPGTPARFSGSLLGGKAALTLSGVQPEDEAEYYCTLWYSNRWVFGGGTKLTVLGGGSGGGSQVKLEESGGGSVQTGGSLRLTCAASGRTSRSYGMGWFRQAPGKEREFVSGISWRGDSTGYADSVKGRFTISRDNAKNTVDLQMNSLKPEDTAIYYCAAAAGSAWYGTLYEYDYWGQGTQVTVSSGGGSKKLADEPEGGGSQTVVTQEPSLTVSPGGTVTLTCGSSTGAVTSGNYPNWVQQKPGQAPRGLIGDYKDDDDKGTPARFSGSLLGGKAALTLSGVQPEDEAEYYCVLWYSNRWVFGGGTKLTVLGGGSGGGSEVQLVESGGGLVQPGGSLKLSCAASGFTFNKYAMNWVRQAPGKGLEWVARIRSKYDYKDDDDKADSVKDRFTISRDDSKNTAYLQMNNLKTEDTAVYYCVRHGNFGNSYISYWAYWGQGTLVTVSSGGGGSGGGSEVQLVESGGGLVQPGNSLRLSCAASGFTFSKFGMSWVRQAPGKGLEWVSSISGSGRDTLYAESVKGRFTISRDNAKTTLYLQMNSLRPEDTAVYYCTIGGSLSVSSQGTLVTVSS

SEQ ID NO: 413 - protein, 895 aa, Artificial Sequence; identical to SEQ ID NO: 336
  Description of Artificial Sequence: Synthetic polypeptide
  Pro225 (FL aB7H3 hF7 MMP9 linker) Format 2

SEQ ID NO: 414 - protein, 891 aa, Artificial Sequence
  Description of Artificial Sequence: Synthetic polypeptide
  Pro226 (FL aB7H3 hF12 MMP9 linker) Format 2
QVQLQESGGGLVQPGGSLRLSCEASPRTFSTYSMAWFRQAPGKERSFVAAINWSGGNTSYADSVKGRFTISRDNSKNTLYLQMNSLRAEDTAVYYCAAGGVLAHHNYEYDYWGQGTLVTVSSGGGSGGGSEVQLVESGGGLVQPGGSLKLSCAASGFTFNKYAINWVRQAPGKGLEWVARIRSKYNNYATYYADQVKDRFTISRDDSKNTAYLQMNNLKTEDTAVYYCVRHANFGNSYISYWAYWGQGTLVTVSSGGGSGGGSQTVVTQEPSLTVSPGGTVTLTCASSTGAVTSGNYPNWVQQKPGQAPRGLIGGTKFLVPGTPARFSGSLLGGKAALTLSGVQPEDEAEYYCTLWYSNRWVFGGGTKLTVLGGGSGGGSQVQLQESGGGLVQPGGSLRLSCEASPRTFSTYSMAWFRQAPGKERSFVAAINWSGGNTSYADSVKGRFTISRDNSKNTLYLQMNSLRAEDTAVYYCAAGGVLAHHNYEYDYWGQGTLVTVSSSGGPGPAGMKGLPGSQTVVTQEPSLTVSPGGTVTLTCGSSTGAVTSGNYPNWVQQKPGQAPRGLIGDYKDDDDKGTPARFSGSLLGGKAALTLSGVQPEDEAEYYCVLWYSNRWVFGGGTKLTVLGGGSGGGSEVQLVESGGGLVQPGGSLKLSCAASGFTFNKYAMNWVRQAPGKGLEWVARIRSKYDYKDDDDKADSVKDRFTISRDDSKNTAYLQMNNLKTEDTAVYYCVRHGNFGNSYISYWAYWGQGTLVTVSSGGGGSGGGSEVQLVESGGGLVQPGNSLRLSCAASGFTFSKFGMSWVRQAPGKGLEWVSSISGSGRDTLYAESVKGRFTISRDNAKTTLYLQMNSLRPEDTAVYYCTIGGSLSVSSQGTLVTVSSHHHHHH

SEQ ID NO: 415 - protein, 895 aa, Artificial Sequence
  Description of Artificial Sequence: Synthetic polypeptide
  Pro233 (humanized Pro186) Format 2
QVKLVESGGGVVRPGGSLTLSCAASGRTSRSYGMGWFRQAPGKEREFVSGISWRGDSTGYADSVKGRFTISRDNAKNSLYLQMNSLRAEDTALYYCAAAAGSAWYGTLYEYDYWGQGTLVTVSSGGGSGGGSEVQLVESGGGLVQPGGSLKLSCAASGFTFNKYAINWVRQAPGKGLEWVARIRSKYNNYATYYADQVKDRFTISRDDSKNTAYLQMNNLKTEDTAVYYCVRHANFGNSYISYWAYWGQGTLVTVSSGGGSGGGSQTVVTQEPSLTVSPGGTVTLTCASSTGAVTSGNYPNWVQQKPGQAPRGLIGGTKFLVPGTPARFSGSLLGGKAALTLSGVQPEDEAEYYCTLWYSNRWVFGGGTKLTVLGGGSGGGSQVKLVESGGGVVRPGGSLTLSCAASGRTSRSYGMGWFRQAPGKEREFVSGISWRGDSTGYADSVKGRFTISRDNAKNSLYLQMNSLRAEDTALYYCAAAAGSAWYGTLYEYDYWGQGTLVTVSSSGGPGPAGMKGLPGSQTVVTQEPSLTVSPGGTVTLTCGSSTGAVTSGNYPNWVQQKPGQAPRGLIGDYKDDDDKGTPARFSGSLLGGKAALTLSGVQPEDEAEYYCVLWYSNRWVFGGGTKLTVLGGGSGGGSEVQLVESGGGLVQPGGSLKLSCAASGFTFNKYAMNWVRQAPGKGLEWVARIRSKYDYKDDDDKADSVKDRFTISRDDSKNTAYLQMNNLKTEDTAVYYCVRHGNFGNSYISYWAYWGQGTLVTVSSGGGGSGGGSEVQLVESGGGLVQPGNSLRLSCAASGFTFSKFGMSWVRQAPGKGLEWVSSISGSGRDTLYAESVKGRFTISRDNAKTTLYLQMNSLRPEDTAVYYCTIGGSLSVSSQGTLVTVSSHHHHHH

SEQ ID NO: 416 - protein, 875 aa, Artificial Sequence
  Description of Artificial Sequence: Synthetic polypeptide
  Pro311 (FL aFOLR1 h77.2 MMP9 linker) format 2
QVQLVESGGGLVQPGGSLRLSCAASGFTVSNSVMAWYRQTPGNEREFVAIINSIGITNYADSVKGRFTISRDNSKNTLYLQMNSLRAEDTAVYVCNRNFDRIYWGQGTLVTVSSGGGSGGGSEVQLVESGGGLVQPGGSLKLSCAASGFTFNKYAINWVRQAPGKGLEWVARIRSKYNNYATYYADQVKDRFTISRDDSKNTAYLQMNNLKTEDTAVYYCVRHANFGNSYISYWAYWGQGTLVTVSSGGGSGGGSQTVVTQEPSLTVSPGGTVTLTCASSTGAVTSGNYPNWVQQKPGQAPRGLIGGTKFLVPGTPARFSGSLLGGKAALTLSGVQPEDEAEYYCTLWYSNRWVFGGGTKLTVLGGGSGGGSQVQLVESGGGLVQPGGSLRLSCAASGFTVSNSVMAWYRQTPGNEREFVAIINSIGITNYADSVKGRFTISRDNSKNTLYLQMNSLRAEDTAVYVCNRNFDRIYWGQGTLVTVSSSGGPGPAGMKGLPGSQTVVTQEPSLTVSPGGTVTLTCGSSTGAVTSGNYPNWVQQKPGQAPRGLIGDYKDDDDKGTPARFSGSLLGGKAALTLSGVQPEDEAEYYCVLWYSNRWVFGGGTKLTVLGGGSGGGSEVQLVESGGGLVQPGGSLKLSCAASGFTFNKYAMNWVRQAPGKGLEWVARIRSKYDYKDDDDKADSVKDRFTISRDDSKNTAYLQMNNLKTEDTAVYYCVRHGNFGNSYISYWAYWGQGTLVTVSSGGGGSGGGSEVQLVESGGGLVQPGNSLRLSCAASGFTFSKFGMSWVRQAPGKGLEWVSSISGSGRDTLYAESVKGRFTISRDNAKTTLYLQMNSLRPEDTAVYYCTIGGSLSVSSQGTLVTVSSHHHHHH

SEQ ID NO: 417 - protein, 873 aa, Artificial Sequence
  Description of Artificial Sequence: Synthetic polypeptide
  Pro312 (FL aFOLR1 h59.3 MMP9 linker)
QVQLVESGGGLVQPGGSLRLSCAAPGNTFSISAMGWYRQAPGKQREWVAVTHSDYSTNYADSVKGRFTISRDNSKNTLYLQMNSLRAEDTAVYYCKHYGIDYWGQGTLVTVSSGGGSGGGSEVQLVESGGGLVQPGGSLKLSCAASGFTFNKYAINWVRQAPGKGLEWVARIRSKYNNYATYYADQVKDRFTISRDDSKNTAYLQMNNLKTEDTAVYYCVRHANFGNSYISYWAYWGQGTLVTVSSGGGSGGGSQTVVTQEPSLTVSPGGTVTLTCASSTGAVTSGNYPNWVQQKPGQAPRGLIGGTKFLVPGTPARFSGSLLGGKAALTLSGVQPEDEAEYYCTLWYSNRWVFGGGTKLTVLGGGSGGGSQVQLVESGGGLVQPGGSLRLSCAAPGNTFSISAMGWYRQAPGKQREWVAVTHSDYSTNYADSVKGRFTISRDNSKNTLYLQMNSLRAEDTAVYYCKHYGIDYWGQGTLVTVSSSGGPGPAGMKGLPGSQTVVTQEPSLTVSPGGTVTLTCGSSTGAVTSGNYPNWVQQKPGQAPRGLIGDYKDDDDKGTPARFSGSLLGGKAALTLSGVQPEDEAEYYCVLWYSNRWVFGGGTKLTVLGGGSGGGSEVQLVESGGGLVQPGGSLKLSCAASGFTFNKYAMNWVRQAPGKGLEWVARIRSKYDYKDDDDKADSVKDRFTISRDDSKNTAYLQMNNLKTEDTAVYYCVRHGNFGNSYISYWAYWGQGTLVTVSSGGGGSGGGSEVQLVESGGGLVQPGNSLRLSCAASGFTFSKFGMSWVRQAPGKGLEWVSSISGSGRDTLYAESVKGRFTISRDNAKTTLYLQMNSLRPEDTAVYYCTIGGSLSVSSQGTLVTVSSHHHHHH

SEQ ID NO: 418 - protein, 881 aa, Artificial Sequence
  Description of Artificial Sequence: Synthetic polypeptide
  Pro313 (FL aFOLR1 h22.4 MMP9 linker) format 2
QVQLVESGGGLVQPGGSLRLSCEASGTTFSRDVMGWYRQAPGKQRELVAIISRGGSTNYADSVKGRFTISRDNSKNTLYLQMNSLRAEDTAVYYCNANTATWGRVFWGQGTLVTVSSGGGSGGGSEVQLVESGGGLVQPGGSLKLSCAASGFTFNKYAINWVRQAPGKGLEWVARIRSKYNNYATYYADQVKDRFTISRDDSKNTAYLQMNNLKTEDTAVYYCVRHANFGNSYISYWAYWGQGTLVTVSSGGGSGGGSQTVVTQEPSLTVSPGGTVTLTCASSTGAVTSGNYPNWVQQKPGQAPRGLIGGTKFLVPGTPARFSGSLLGGKAALTLSGVQPEDEAEYYCTLWYSNRWVFGGGTKLTVLGGGSGGGSQVQLVESGGGLVQPGGSLRLSCEASGTTFSRDVMGWYRQAPGKQRELVAIISRGGSTNYADSVKGRFTISRDNSKNTLYLQMNSLRAEDTAVYYCNANTATWGRVFWGQGTLVTVSSSGGPGPAGMKGLPGSQTVVTQEPSLTVSPGGTVTLTCGSSTGAVTSGNYPNWVQQKPGQAPRGLIGDYKDDDDKGTPARFSGSLLGGKAALTLSGVQPEDEAEYYCVLWYSNRWVFGGGTKLTVLGGGSGGGSEVQLVESGGGLVQPGGSLKLSCAASGFTFNKYAMNWVRQAPGKGLEWVARIRSKYDYKDDDDKADSVKDRFTISRDDSKNTAYLQMNNLKTEDTAVYYCVRHGNFGNSYISYWAYWGQGTLVTVSSGGGGSGGGSEVQLVESGGGLVQPGNSLRLSCAASGFTFSKFGMSWVRQAPGKGLEWVSSISGSGRDTLYAESVKGRFTISRDNAKTTLYLQMNSLRPEDTAVYYCTIGGSLSVSSQGTLVTVSSHHHHHH

SEQ ID NO: 419 - protein, 898 aa, Artificial Sequence
  Description of Artificial Sequence: Synthetic polypeptide
  Pro246 (FL haEGFR1/haEGFR2 heterologous COBRA with MMP9 linker)
EVQLVESGGGLVQPGGSLRLSCAASGRTFSSYAMGWFRQAPGKEREFVVAINWSSGSTYYADSVKGRFTISRDNSKNTLYLQMNSLRAEDTAVYYCAAGYQINSGNYNFKDYEYDYWGQGTLVTVSSGGGSGGGSEVQLVESGGGLVQPGGSLKLSCAASGFTFNKYAINWVRQAPGKGLEWVARIRSKYNNYATYYADQVKDRFTISRDDSKNTAYLQMNNLKTEDTAVYYCVRHANFGNSYISYWAYWGQGTLVTVSSGGGSGGGSQTVVTQEPSLTVSPGGTVTLTCASSTGAVTSGNYPNWVQQKPGQAPRGLIGGTKFLVPGTPARFSGSLLGGKAALTLSGVQPEDEAEYYCTLWYSNRWVFGGGTKLTVLGGGSGGGSQVKLVESGGGVVRPGGSLTLSCAASGRTSRSYGMGWFRQAPGKEREFVSGISWRGDSTGYADSVKGRFTISRDNAKNSLYLQMNSLRAEDTALYYCAAAAGSAWYGTLYEYDYWGQGTLVTVSSSGGPGPAGMKGLPGSQTVVTQEPSLTVSPGGTVTLTCGSSTGAVTSGNYPNWVQQKPGQAPRGLIGDYKDDDDKGTPARFSGSLLGGKAALTLSGVQPEDEAEYYCVLWYSNRWVFGGGTKLTVLGGGSGGGSEVQLVESGGGLVQPGGSLKLSCAASGFTFNKYAMNWVRQAPGKGLEWVARIRSKYDYKDDDDKADSVKDRFTISRDDSKNTAYLQMNNLKTEDTAVYYCVRHGNFGNSYISYWAYWGQGTLVTVSSGGGGSGGGSEVQLVESGGGLVQPGNSLRLSCAASGFTFSKFGMSWVRQAPGKGLEWVSSISGSGRDTLYAESVKGRFTISRDNAKTTLYLQMNSLRPEDTAVYYCTIGGSLSVSSQGTLVTVSSHHHHHH

SEQ ID NO: 420 - protein, 893 aa, Artificial Sequence
  Description of Artificial Sequence: Synthetic polypeptide
  Pro256 (FL haEpCAM VIB13/haEGFR1 heterologous COBRA MMP9 linker)
QVQLVESGGGLVQPGGSLTLSCAASGTGSIFSINLMGWYRQAPGKQRELVARITSGDSTVYADSVKGRFTISRDNSKNTLYLQMNSLRPEDTAVYYCNLLLRSSPGATTPYWGQGTLVTVSSGGGSGGGSEVQLVESGGGLVQPGGSLKLSCAASGFTFNKYAINWVRQAPGKGLEWVARIRSKYNNYATYYADQVKDRFTISRDDSKNTAYLQMNNLKTEDTAVYYCVRHANFGNSYISYWAYWGQGTLVTVSSGGGSGGGSQTVVTQEPSLTVSPGGTVTLTCASSTGAVTSGNYPNWVQQKPGQAPRGLIGGTKFLVPGTPARFSGSLLGGKAALTLSGVQPEDEAEYYCTLWYSNRWVFGGGTKLTVLGGGSGGGSQVKLVESGGGVVRPGGSLTLSCAASGRTSRSYGMGWFRQAPGKEREFVSGISWRGDSTGYADSVKGRFTISRDNAKNSLYLQMNSLRAEDTALYYCAAAAGSAWYGTLYEYDYWGQGTLVTVSSSGGPGPAGMKGLPGSQTVVTQEPSLTVSPGGTVTLTCGSSTGAVTSGNYPNWVQQKPGQAPRGLIGDYKDDDDKGTPARFSGSLLGGKAALTLSGVQPEDEAEYYCVLWYSNRWVFGGGTKLTVLGGGSGGGSEVQLVESGGGLVQPGGSLKLSCAASGFTFNKYAMNWVRQAPGKGLEWVARIRSKYDYKDDDDKADSVKDRFTISRDDSKNTAYLQMNNLKTEDTAVYYCVRHGNFGNSYISYWAYWGQGTLVTVSSGGGGSGGGSEVQLVESGGGLVQPGNSLRLSCAASGFTFSKFGMSWVRQAPGKGLEWVSSISGSGRDTLYAESVKGRFTISRDNAKTTLYLQMNSLRPEDTAVYYCTIGGSLSVSSQGTLVTVSSHHHHHH

SEQ ID NO: 421 - protein, 885 aa, Artificial Sequence; identical to SEQ ID NO: 318
  Description of Artificial Sequence: Synthetic polypeptide
  Pro420 (FL aFOLR1 h77.2/haEGFR1 heterologous COBRA MMP9 linker)

SEQ ID NO: 422 - protein, 885 aa, Artificial Sequence; identical to SEQ ID NO: 319
  Description of Artificial Sequence: Synthetic polypeptide
  Pro421 (FL haEGFR1/aFOLR1 h77.2 heterologous COBRA MMP9 linker)

SEQ ID NO: 423 - protein, 896 aa, Artificial Sequence
  Description of Artificial Sequence: Synthetic polypeptide
  Pro393 (Pro186 S9 linker)
QVKLEESGGGSVQTGGSLRLTCAASGRTSRSYGMGWFRQAPGKEREFVSGISWRGDSTGYADSVKGRFTISRDNAKNTVDLQMNSLKPEDTAIYYCAAAAGSAWYGTLYEYDYWGQGTQVTVSSGGGSGGGSEVQLVESGGGLVQPGGSLKLSCAASGFTFNKYAINWVRQAPGKGLEWVARIRSKYNNYATYYADQVKDRFTISRDDSKNTAYLQMNNLKTEDTAVYYCVRHANFGNSYISYWAYWGQGTLVTVSSGGGSGGGSQTVVTQEPSLTVSPGGTVTLTCASSTGAVTSGNYPNWVQQKPGQAPRGLIGGTKFLVPGTPARFSGSLLGGKAALTLSGVQPEDEAEYYCTLWYSNRWVFGGGTKLTVLGGGSGGGSQVKLEESGGGSVQTGGSLRLTCAASGRTSRSYGMGWFRQAPGKEREFVSGISWRGDSTGYADSVKGRFTISRDNAKNTVDLQMNSLKPEDTAIYYCAAAAGSAWYGTLYEYDYWGQGTQVTVSSGARLQSAAPAGLKGAGQTVVTQEPSLTVSPGGTVTLTCGSSTGAVTSGNYPNWVQQKPGQAPRGLIGDYKDDDDKGTPARFSGSLLGGKAALTLSGVQPEDEAEYYCVLWYSNRWVFGGGTKLTVLGGGSGGGSEVQLVESGGGLVQPGGSLKLSCAASGFTFNKYAMNWVRQAPGKGLEWVARIRSKYDYKDDDDKADSVKDRFTISRDDSKNTAYLQMNNLKTEDTAVYYCVRHGNFGNSYISYWAYWGQGTLVTVSSGGGGSGGGSEVQLVESGGGLVQPGNSLRLSCAASGFTFSKFGMSWVRQAPGKGLEWVSSISGSGRDTLYAESVKGRFTISRDNAKTTLYLQMNSLRPEDTAVYYCTIGGSLSVSSQGTLVTVSSHHHHHH

SEQ ID NO: 424 - protein, 896 aa, Artificial Sequence
  Description of Artificial Sequence: Synthetic polypeptide
  Pro394 (Pro186 ST14(MV) linker)
QVKLEESGGGSVQTGGSLRLTCAASGRTSRSYGMGWFRQAPGKEREFVSGISWRGDSTGYADSVKGRFTISRDNAKNTVDLQMNSLKPEDTAIYYCAAAAGSAWYGTLYEYDYWGQGTQVTVSSGGGSGGGSEVQLVESGGGLVQPGGSLKLSCAASGFTFNKYAINWVRQAPGKGLEWVARIRSKYNNYATYYADQVKDRFTISRDDSKNTAYLQMNNLKTEDTAVYYCVRHANFGNSYISYWAYWGQGTLVTVSSGGGSGGGSQTVVTQEPSLTVSPGGTVTLTCASSTGAVTSGNYPNWVQQKPGQAPRGLIGGTKFLVPGTPARFSGSLLGGKAALTLSGVQPEDEAEYYCTLWYSNRWVFGGGTKLTVLGGGSGGGSQVKLEESGGGSVQTGGSLRLTCAASGRTSRSYGMGWFRQAPGKEREFVSGISWRGDSTGYADSVKGRFTISRDNAKNTVDLQMNSLKPEDTAIYYCAAAAGSAWYGTLYEYDYWGQGTQVTVSSGGGSFTRQARVVGGGSQTVVTQEPSLTVSPGGTVTLTCGSSTGAVTSGNYPNWVQQKPGQAPRGLIGDYKDDDDKGTPARFSGSLLGGKAALTLSGVQPEDEAEYYCVLWYSNRWVFGGGTKLTVLGGGSGGGSEVQLVESGGGLVQPGGSLKLSCAASGFTFNKYAMNWVRQAPGKGLEWVARIRSKYDYKDDDDKADSVKDRFTISRDDSKNTAYLQMNNLKTEDTAVYYCVRHGNFGNSYISYWAYWGQGTLVTVSSGGGGSGGGSEVQLVESGGGLVQPGNSLRLSCAASGFTFSKFGMSWVRQAPGKGLEWVSSISGSGRDTLYAESVKGRFTISRDNAKTTLYLQMNSLRPEDTAVYYCTIGGSLSVSSQGTLVTVSSHHHHHH

SEQ ID NO: 425 - protein, 896 aa, Artificial Sequence
  Description of Artificial Sequence: Synthetic polypeptide
  Pro395 (Pro186 CathS linker)
QVKLEESGGGSVQTGGSLRLTCAASGRTSRSYGMGWFRQAPGKEREFVSGISWRGDSTGYADSVKGRFTISRDNAKNTVDLQMNSLKPEDTAIYYCAAAAGSAWYGTLYEYDYWGQGTQVTVSSGGGSGGGSEVQLVESGGGLVQPGGSLKLSCAASGFTFNKYAINWVRQAPGKGLEWVARIRSKYNNYATYYADQVKDRFTISRDDSKNTAYLQMNNLKTEDTAVYYCVRHANFGNSYISYWAYWGQGTLVTVSSGGGSGGGSQTVVTQEPSLTVSPGGTVTLTCASSTGAVTSGNYPNWVQQKPGQAPRGLIGGTKFLVPGTPARFSGSLLGGKAALTLSGVQPEDEAEYYCTLWYSNRWVFGGGTKLTVLGGGSGGGSQVKLEESGGGSVQTGGSLRLTCAASGRTSRSYGMGWFRQAPGKEREFVSGISWRGDSTGYADSVKGRFTISRDNAKNTVDLQMNSLKPEDTAIYYCAAAAGSAWYGTLYEYDYWGQGTQVTVSSGGGSARLQSAAPGGGSQTVVTQEPSLTVSPGGTVTLTCGSSTGAVTSGNYPNWVQQKPGQAPRGLIGDYKDDDDKGTPARFSGSLLGGKAALTLSGVQPEDEAEYYCVLWYSNRWVFGGGTKLTVLGGGSGGGSEVQLVESGGGLVQPGGSLKLSCAASGFTFNKYAMNWVRQAPGKGLEWVARIRSKYDYKDDDDKADSVKDRFTISRDDSKNTAYLQMNNLKTEDTAVYYCVRHGNFGNSYISYWAYWGQGTLVTVSSGGGGSGGGSEVQLVESGGGLVQPGNSLRLSCAASGFTFSKFGMSWVRQAPGKGLEWVSSISGSGRDTLYAESVKGRFTISRDNAKTTLYLQMNSLRPEDTAVYYCTIGGSLSVSSQGTLVTVSSHHHHHH

SEQ ID NO: 426 - protein, 897 aa, Artificial Sequence; identical to SEQ ID NO: 314
  Description of Artificial Sequence: Synthetic polypeptide
  Pro396 (Pro186 MMP9v linker)

SEQ ID NO: 427 - protein, 896 aa, Artificial Sequence
  Description of Artificial Sequence: Synthetic polypeptide
  Pro429 (Pro186 Meprin/GranzymeB linker)
QVKLEESGGGSVQTGGSLRLTCAASGRTSRSYGMGWFRQAPGKEREFVSGISWRGDSTGYADSVKGRFTISRDNAKNTVDLQMNSLKPEDTAIYYCAAAAGSAWYGTLYEYDYWGQGTQVTVSSGGGSGGGSEVQLVESGGGLVQPGGSLKLSCAASGFTFNKYAINWVRQAPGKGLEWVARIRSKYNNYATYYADQVKDRFTISRDDSKNTAYLQMNNLKTEDTAVYYCVRHANFGNSYISYWAYWGQGTLVTVSSGGGSGGGSQTVVTQEPSLTVSPGGTVTLTCASSTGAVTSGNYPNWVQQKPGQAPRGLIGGTKFLVPGTPARFSGSLLGGKAALTLSGVQPEDEAEYYCTLWYSNRWVFGGGTKLTVLGGGSGGGSQVKLEESGGGSVQTGGSLRLTCAASGRTSRSYGMGWFRQAPGKEREFVSGISWRGDSTGYADSVKGRFTISRDNAKNTVDLQMNSLKPEDTAIYYCAAAAGSAWYGTLYEYDYWGQGTQVTVSSSGGGVYADSLEDGGGSQTVVTQEPSLTVSPGGTVTLTCGSSTGAVTSGNYPNWVQQKPGQAPRGLIGDYKDDDDKGTPARFSGSLLGGKAALTLSGVQPEDEAEYYCVLWYSNRWVFGGGTKLTVLGGGSGGGSEVQLVESGGGLVQPGGSLKLSCAASGFTFNKYAMNWVRQAPGKGLEWVARIRSKYDYKDDDDKADSVKDRFTISRDDSKNTAYLQMNNLKTEDTAVYYCVRHGNFGNSYISYWAYWGQGTLVTVSSGGGGSGGGSEVQLVESGGGLVQPGNSLRLSCAASGFTFSKFGMSWVRQAPGKGLEWVSSISGSGRDTLYAESVKGRFTISRDNAKTTLYLQMNSLRPEDTAVYYCTIGGSLSVSSQGTLVTVSSHHHHHH

SEQ ID NO: 428 - protein, 895 aa, Artificial Sequence
  Description of Artificial Sequence: Synthetic polypeptide
  Pro430 (Pro186 MMP9-2 linker)
QVKLEESGGGSVQTGGSLRLTCAASGRTSRSYGMGWFRQAPGKEREFVSGISWRGDSTGYADSVKGRFTISRDNAKNTVDLQMNSLKPEDTAIYYCAAAAGSAWYGTLYEYDYWGQGTQVTVSSGGGSGGGSEVQLVESGGGLVQPGGSLKLSCAASGFTFNKYAINWVRQAPGKGLEWVARIRSKYNNYATYYADQVKDRFTISRDDSKNTAYLQMNNLKTEDTAVYYCVRHANFGNSYISYWAYWGQGTLVTVSSGGGSGGGSQTVVTQEPSLTVSPGGTVTLTCASSTGAVTSGNYPNWVQQKPGQAPRGLIGGTKFLVPGTPARFSGSLLGGKAALTLSGVQPEDEAEYYCTLWYSNRWVFGGGTKLTVLGGGSGGGSQVKLEESGGGSVQTGGSLRLTCAASGRTSRSYGMGWFRQAPGKEREFVSGISWRGDSTGYADSVKGRFTISRDNAKNTVDLQMNSLKPEDTAIYYCAAAAGSAWYGTLYEYDYWGQGTQVTVSSSGGPGPAGLKGAPGSQTVVTQEPSLTVSPGGTVTLTCGSSTGAVTSGNYPNWVQQKPGQAPRGLIGDYKDDDDKGTPARFSGSLLGGKAALTLSGVQPEDEAEYYCVLWYSNRWVFGGGTKLTVLGGGSGGGSEVQLVESGGGLVQPGGSLKLSCAASGFTFNKYAMNWVRQAPGKGLEWVARIRSKYDYKDDDDKADSVKDRFTISRDDSKNTAYLQMNNLKTEDTAVYYCVRHGNFGNSYISYWAYWGQGTLVTVSSGGGGSGGGSEVQLVESGGGLVQPGNSLRLSCAASGFTFSKFGMSWVRQAPGKGLEWVSSISGSGRDTLYAESVKGRFTISRDNAKTTLYLQMNSLRPEDTAVYYCTIGGSLSVSSQGTLVTVSSHHHHHH

SEQ ID NO: 429 - protein, 896 aa, Artificial Sequence
  Description of Artificial Sequence: Synthetic polypeptide
  Pro431 (Pro186 ST14(MS) linker)
QVKLEESGGGSVQTGGSLRLTCAASGRTSRSYGMGWFRQAPGKEREFVSGISWRGDSTGYADSVKGRFTISRDNAKNTVDLQMNSLKPEDTAIYYCAAAAGSAWYGTLYEYDYWGQGTQVTVSSGGGSGGGSEVQLVESGGGLVQPGGSLKLSCAASGFTFNKYAINWVRQAPGKGLEWVARIRSKYNNYATYYADQVKDRFTISRDDSKNTAYLQMNNLKTEDTAVYYCVRHANFGNSYISYWAYWGQGTLVTVSSGGGSGGGSQTVVTQEPSLTVSPGGTVTLTCASSTGAVTSGNYPNWVQQKPGQAPRGLIGGTKFLVPGTPARFSGSLLGGKAALTLSGVQPEDEAEYYCTLWYSNRWVFGGGTKLTVLGGGSGGGSQVKLEESGGGSVQTGGSLRLTCAASGRTSRSYGMGWFRQAPGKEREFVSGISWRGDSTGYADSVKGRFTISRDNAKNTVDLQMNSLKPEDTAIYYCAAAAGSAWYGTLYEYDYWGQGTQVTVSSGGGSLSGRSDNHGGGSQTVVTQEPSLTVSPGGTVTLTCGSSTGAVTSGNYPNWVQQKPGQAPRGLIGDYKDDDDKGTPARFSGSLLGGKAALTLSGVQPEDEAEYYCVLWYSNRWVFGGGTKLTVLGGGSGGGSEVQLVESGGGLVQPGGSLKLSCAASGFTFNKYAMNWVRQAPGKGLEWVARIRSKYDYKDDDDKADSVKDRFTISRDDSKNTAYLQMNNLKTEDTAVYYCVRHGNFGNSYISYWAYWGQGTLVTVSSGGGGSGGGSEVQLVESGGGLVQPGNSLRLSCAASGFTFSKFGMSWVRQAPGKGLEWVSSISGSGRDTLYAESVKGRFTISRDNAKTTLYLQMNSLRPEDTAVYYCTIGGSLSVSSQGTLVTVSSHHHHHH

SEQ ID NO: 430 - protein, 763 aa, Artificial Sequence
  Description of Artificial Sequence: Synthetic polypeptide
  Pro258 (Pro186 with a single aEGFR domain and a central aHSA domain)
QVKLVESGGGVVRPGGSLTLSCAASGRTSRSYGMGWFRQAPGKEREFVSGISWRGDSTGYADSVKGRFTISRDNAKNSLYLQMNSLRAEDTALYYCAAAAGSAWYGTLYEYDYWGQGTLVTVSSGGGSGGGSEVQLVESGGGLVQPGGSLKLSCAASGFTFNKYAINWVRQAPGKGLEWVARIRSKYNNYATYYADQVKDRFTISRDDSKNTAYLQMNNLKTEDTAVYYCVRHANFGNSYISYWAYWGQGTLVTVSSGGGSGGGSQTVVTQEPSLTVSPGGTVTLTCASSTGAVTSGNYPNWVQQKPGQAPRGLIGGTKFLVPGTPARFSGSLLGGKAALTLSGVQPEDEAEYYCTLWYSNRWVFGGGTKLTVLSGGPGPAGMKGLPGSEVQLVESGGGLVQPGNSLRLSCAASGFTFSKFGMSWVRQAPGKGLEWVSSISGSGRDTLYAESVKGRFTISRDNAKTTLYLQMNSLRPEDTAVYYCTIGGSLSVSSQGTLVTVSSGGGGSGGGSQTVVTQEPSLTVSPGGTVTLTCGSSTGAVTSGNYPNWVQQKPGQAPRGLIGDYKDDDDKGTPARFSGSLLGGKAALTLSGVQPEDEAEYYCVLWYSNRWVFGGGTKLTVLGGGSGGGSEVQLVESGGGLVQPGGSLKLSCAASGFTFNKYAMNWVRQAPGKGLEWVARIRSKYDYKDDDDKADSVKDRFTISRDDSKNTAYLQMNNLKTEDTAVYYCVRHGNFGNSYISYWAYWGQGTLVTVSSHHHHHH

SEQ ID NO: 431 - protein, 896 aa, Artificial Sequence
  Description of Artificial Sequence: Synthetic polypeptide
  Pro221
QVKLEESGGGSVQTGGSLRLTCAASGRTSRSYGMGWFRQAPGKEREFVSGISWRGDSTGYADSVKGRFTISRDNAKNTVDLQMNSLKPEDTAIYYCAAAAGSAWYGTLYEYDYWGQGTQVTVSSGGGSGGGSEVQLVESGGGLVQPGGSLKLSCAASGFTFNKYAINWVRQAPGKGLEWVARIRSKYNNYATYYADQVKDRFTISRDDSKNTAYLQMNNLKTEDTAVYYCVRHANFGNSYISYWAYWGQGTLVTVSSGGGSGGGSQTVVTQEPSLTVSPGGTVTLTCASSTGAVTSGNYPNWVQQKPGQAPRGLIGGTKFLVPGTPARFSGSLLGGKAALTLSGVQPEDEAEYYCTLWYSNRWVFGGGTKLTVLGGGSGGGSQVKLEESGGGSVQTGGSLRLTCAASGRTSRSYGMGWFRQAPGKEREFVSGISWRGDSTGYADSVKGRFTISRDNAKNTVDLQMNSLKPEDTAIYYCAAAAGSAWYGTLYEYDYWGQGTQVTVSSSGGGQNPYSAGRGGGSQTVVTQEPSLTVSPGGTVTLTCGSSTGAVTSGNYPNWVQQKPGQAPRGLIGDYKDDDDKGTPARFSGSLLGGKAALTLSGVQPEDEAEYYCVLWYSNRWVFGGGTKLTVLGGGSGGGSEVQLVESGGGLVQPGGSLKLSCAASGFTFNKYAMNWVRQAPGKGLEWVARIRSKYDYKDDDDKADSVKDRFTISRDDSKNTAYLQMNNLKTEDTAVYYCVRHGNFGNSYISYWAYWGQGTLVTVSSGGGGSGGGSEVQLVESGGGLVQPGNSLRLSCAASGFTFSKFGMSWVRQAPGKGLEWVSSISGSGRDTLYAESVKGRFTISRDNAKTTLYLQMNSLRPEDTAVYYCTIGGSLSVSSQGTLVTVSSHHHHHH

SEQ ID NO: 432 - protein, 896 aa, Artificial Sequence
  Description of Artificial Sequence: Synthetic polypeptide
  Pro222
QVKLEESGGGSVQTGGSLRLTCAASGRTSRSYGMGWFRQAPGKEREFVSGISWRGDSTGYADSVKGRFTISRDNAKNTVDLQMNSLKPEDTAIYYCAAAAGSAWYGTLYEYDYWGQGTQVTVSSGGGSGGGSEVQLVESGGGLVQPGGSLKLSCAASGFTFNKYAINWVRQAPGKGLEWVARIRSKYNNYATYYADQVKDRFTISRDDSKNTAYLQMNNLKTEDTAVYYCVRHANFGNSYISYWAYWGQGTLVTVSSGGGSGGGSQTVVTQEPSLTVSPGGTVTLTCASSTGAVTSGNYPNWVQQKPGQAPRGLIGGTKFLVPGTPARFSGSLLGGKAALTLSGVQPEDEAEYYCTLWYSNRWVFGGGTKLTVLGGGSGGGSQVKLEESGGGSVQTGGSLRLTCAASGRTSRSYGMGWFRQAPGKEREFVSGISWRGDSTGYADSVKGRFTISRDNAKNTVDLQMNSLKPEDTAIYYCAAAAGSAWYGTLYEYDYWGQGTQVTVSSSGGGQNPYSAGGGSGGQTVVTQEPSLTVSPGGTVTLTCGSSTGAVTSGNYPNWVQQKPGQAPRGLIGDYKDDDDKGTPARFSGSLLGGKAALTLSGVQPEDEAEYYCVLWYSNRWVFGGGTKLTVLGGGSGGGSEVQLVESGGGLVQPGGSLKLSCAASGFTFNKYAMNWVRQAPGKGLEWVARIRSKYDYKDDDDKADSVKDRFTISRDDSKNTAYLQMNNLKTEDTAVYYCVRHGNFGNSYISYWAYWGQGTLVTVSSGGGGSGGGSEVQLVESGGGLVQPGNSLRLSCAASGFTFSKFGMSWVRQAPGKGLEWVSSISGSGRDTLYAESVKGRFTISRDNAKTTLYLQMNSLRPEDTAVYYCTIGGSLSVSSQGTLVTVSSHHHHHH

SEQ ID NO: 433 - protein, 896 aa, Artificial Sequence
  Description of Artificial Sequence: Synthetic polypeptide
  Pro223
QVKLEESGGGSVQTGGSLRLTCAASGRTSRSYGMGWFRQAPGKEREFVSGISWRGDSTGYADSVKGRFTISRDNAKNTVDLQMNSLKPEDTAIYYCAAAAGSAWYGTLYEYDYWGQGTQVTVSSGGGSGGGSEVQLVESGGGLVQPGGSLKLSCAASGFTFNKYAINWVRQAPGKGLEWVARIRSKYNNYATYYADQVKDRFTISRDDSKNTAYLQMNNLKTEDTAVYYCVRHANFGNSYISYWAYWGQGTLVTVSSGGGSGGGSQTVVTQEPSLTVSPGGTVTLTCASSTGAVTSGNYPNWVQQKPGQAPRGLIGGTKFLVPGTPARFSGSLLGGKAALTLSGVQPEDEAEYYCTLWYSNRWVFGGGTKLTVLGGGSGGGSQVKLEESGGGSVQTGGSLRLTCAASGRTSRSYGMGWFRQAPGKEREFVSGISWRGDSTGYADSVKGRFTISRDNAKNTVDLQMNSLKPEDTAIYYCAAAAGSAWYGTLYEYDYWGQGTQVTVSSSGGGRNVYSAGGGSGGQTVVTQEPSLTVSPGGTVTLTCGSSTGAVTSGNYPNWVQQKPGQAPRGLIGDYKDDDDKGTPARFSGSLLGGKAALTLSGVQPEDEAEYYCVLWYSNRWVFGGGTKLTVLGGGSGGGSEVQLVESGGGLVQPGGSLKLSCAASGFTFNKYAMNWVRQAPGKGLEWVARIRSKYDYKDDDDKADSVKDRFTISRDDSKNTAYLQMNNLKTEDTAVYYCVRHGNFGNSYISYWAYWGQGTLVTVSSGGGGSGGGSEVQLVESGGGLVQPGNSLRLSCAASGFTFSKFGMSWVRQAPGKGLEWVSSISGSGRDTLYAESVKGRFTISRDNAKTTLYLQMNSLRPEDTAVYYCTIGGSLSVSSQGTLVTVSSHHHHHH

SEQ ID NO: 434 - protein, 896 aa, Artificial Sequence
  Description of Artificial Sequence: Synthetic polypeptide
  Pro224
QVKLEESGGGSVQTGGSLRLTCAASGRTSRSYGMGWFRQAPGKEREFVSGISWRGDSTGYADSVKGRFTISRDNAKNTVDLQMNSLKPEDTAIYYCAAAAGSAWYGTLYEYDYWGQGTQVTVSSGGGSGGGSEVQLVESGGGLVQPGGSLKLSCAASGFTFNKYAINWVRQAPGKGLEWVARIRSKYNNYATYYADQVKDRFTISRDDSKNTAYLQMNNLKTEDTAVYYCVRHANFGNSYISYWAYWGQGTLVTVSSGGGSGGGSQTVVTQEPSLTVSPGGTVTLTCASSTGAVTSGNYPNWVQQKPGQAPRGLIGGTKFLVPGTPARFSGSLLGGKAALTLSGVQPEDEAEYYCTLWYSNRWVFGGGTKLTVLGGGSGGGSQVKLEESGGGSVQTGGSLRLTCAASGRTSRSYGMGWFRQAPGKEREFVSGISWRGDSTGYADSVKGRFTISRDNAKNTVDLQMNSLKPEDTAIYYCAAAAGSAWYGTLYEYDYWGQGTQVTVSSSGGGQNTWSAGKGGGSQTVVTQEPSLTVSPGGTVTLTCGSSTGAVTSGNYPNWVQQKPGQAPRGLIGDYKDDDDKGTPARFSGSLLGGKAALTLSGVQPEDEAEYYCVLWYSNRWVFGGGTKLTVLGGGSGGGSEVQLVESGGGLVQPGGSLKLSCAASGFTFNKYAMNWVRQAPGKGLEWVARIRSKYDYKDDDDKADSVKDRFTISRDDSKNTAYLQMNNLKTEDTAVYYCVRHGNFGNSYISYWAYWGQGTLVTVSSGGGGSGGGSEVQLVESGGGLVQPGNSLRLSCAASGFTFSKFGMSWVRQAPGKGLEWVSSISGSGRDTLYAESVKGRFTISRDNAKTTLYLQMNSLRPEDTAVYYCTIGGSLSVSSQGTLVTVSSHHHHHH

SEQ ID NO: 435 - protein, 898 aa, Artificial Sequence
  Description of Artificial Sequence: Synthetic polypeptide
  Pro254
QVKLVESGGGVVRPGGSLTLSCAASGRTSRSYGMGWFRQAPGKEREFVSGISWRGDSTGYADSVKGRFTISRDNAKNSLYLQMNSLRAEDTALYYCAAAAGSAWYGTLYEYDYWGQGTLVTVSSGGGSGGGSEVQLVESGGGLVQPGGSLKLSCAASGFTFNKYAINWVRQAPGKGLEWVARIRSKYNNYATYYADQVKDRFTISRDDSKNTAYLQMNNLKTEDTAVYYCVRHANFGNSYISYWAYWGQGTLVTVSSGGGSGGGSQTVVTQEPSLTVSPGGTVTLTCASSTGAVTSGNYPNWVQQKPGQAPRGLIGGTKFLVPGTPARFSGSLLGGKAALTLSGVQPEDEAEYYCTLWYSNRWVFGGGTKLTVLGGGSGGGSEVQLVESGGGLVQPGGSLRLSCAASGRTFSSYAMGWFRQAPGKEREFVVAINWSSGSTYYADSVKGRFTISRDNSKNTLYLQMNSLRAEDTAVYYCAAGYQINSGNYNFKDYEYDYWGQGTLVTVSSSGGPGPAGMKGLPGSQTVVTQEPSLTVSPGGTVTLTCGSSTGAVTSGNYPNWVQQKPGQAPRGLIGDYKDDDDKGTPARFSGSLLGGKAALTLSGVQPEDEAEYYCVLWYSNRWVFGGGTKLTVLGGGSGGGSEVQLVESGGGLVQPGGSLKLSCAASGFTFNKYAMNWVRQAPGKGLEWVARIRSKYDYKDDDDKADSVKDRFTISRDDSKNTAYLQMNNLKTEDTAVYYCVRHGNFGNSYISYWAYWGQGTLVTVSSGGGGSGGGSEVQLVESGGGLVQPGNSLRLSCAASGFTFSKFGMSWVRQAPGKGLEWVSSISGSGRDTLYAESVKGRFTISRDNAKTTLYLQMNSLRPEDTAVYYCTIGGSLSVSSQGTLVTVSSHHHHHH

SEQ ID NO: 436 - protein, 893 aa, Artificial Sequence
  Description of Artificial Sequence: Synthetic polypeptide
  Pro255
QVKLVESGGGVVRPGGSLTLSCAASGRTSRSYGMGWFRQAPGKEREFVSGISWRGDSTGYADSVKGRFTISRDNAKNSLYLQMNSLRAEDTALYYCAAAAGSAWYGTLYEYDYWGQGTLVTVSSGGGSGGGSEVQLVESGGGLVQPGGSLKLSCAASGFTFNKYAINWVRQAPGKGLEWVARIRSKYNNYATYYADQVKDRFTISRDDSKNTAYLQMNNLKTEDTAVYYCVRHANFGNSYISYWAYWGQGTLVTVSSGGGSGGGSQTVVTQEPSLTVSPGGTVTLTCASSTGAVTSGNYPNWVQQKPGQAPRGLIGGTKFLVPGTPARFSGSLLGGKAALTLSGVQPEDEAEYYCTLWYSNRWVFGGGTKLTVLGGGSGGGSQVQLVESGGGLVQPGGSLTLSCAASGTGSIFSINLMGWYRQAPGKQRELVARITSGDSTVYADSVKGRFTISRDNSKNTLYLQMNSLRPEDTAVYYCNLLLRSSPGATTPYWGQGTLVTVSSSGGPGPAGMKGLPGSQTVVTQEPSLTVSPGGTVTLTCGSSTGAVTSGNYPNWVQQKPGQAPRGLIGDYKDDDDKGTPARFSGSLLGGKAALTLSGVQPEDEAEYYCVLWYSNRWVFGGGTKLTVLGGGSGGGSEVQLVESGGGLVQPGGSLKLSCAASGFTFNKYAMNWVRQAPGKGLEWVARIRSKYDYKDDDDKADSVKDRFTISRDDSKNTAYLQMNNLKTEDTAVYYCVRHGNFGNSYISYWAYWGQGTLVTVSSGGGGSGGGSEVQLVESGGGLVQPGNSLRLSCAASGFTFSKFGMSWVRQAPGKGLEWVSSISGSGRDTLYAESVKGRFTISRDNAKTTLYLQMNSLRPEDTAVYYCTIGGSLSVSSQGTLVTVSSHHHHHH

SEQ ID NO: 437 - protein, 902 aa, Artificial Sequence
  Description of Artificial Sequence: Synthetic polypeptide
  Pro262
QVKLEESGGGSVQTGGSLRLTCAASGRTSRSYGMGWFRQAPGKEREFVSGISWRGDSTGYADSVKGRFTISRDNAKNTVDLQMNSLKPEDTAIYYCAAAAGSAWYGTLYEYDYWGQGTQVTVSSGGGSGGGSEVQLVESGGGLVQPGGSLKLSCAASGFTFNKYAINWVRQAPGKGLEWVARIRSKYNNYATYYADQVKDRFTISRDDSKNTAYLQMNNLKTEDTAVYYCVRHANFGNSYISYWAYWGQGTLVTVSSGGGGSGGGGSGGGGSQTVVTQEPSLTVSPGGTVTLTCASSTGAVTSGNYPNWVQQKPGQAPRGLIGGTKFLVPGTPARFSGSLLGGKAALTLSGVQPEDEAEYYCTLWYSNRWVFGGGTKLTVLGGGSGGGSQVKLEESGGGSVQTGGSLRLTCAASGRTSRSYGMGWFRQAPGKEREFVSGISWRGDSTGYADSVKGRFTISRDNAKNTVDLQMNSLKPEDTAIYYCAAAAGSAWYGTLYEYDYWGQGTQVTVSSSGGPGPAGMKGLPGSQTVVTQEPSLTVSPGGTVTLTCGSSTGAVTSGNYPNWVQQKPGQAPRGLIGDYKDDDDKGTPARFSGSLLGGKAALTLSGVQPEDEAEYYCVLWYSNRWVFGGGTKLTVLGGGSGGGSEVQLVESGGGLVQPGGSLKLSCAASGFTFNKYAMNWVRQAPGKGLEWVARIRSKYDYKDDDDKADSVKDRFTISRDDSKNTAYLQMNNLKTEDTAVYYCVRHGNFGNSYISYWAYWGQGTLVTVSSGGGGSGGGSEVQLVESGGGLVQPGNSLRLSCAASGFTFSKFGMSWVRQAPGKGLEWVSSISGSGRDTLYAESVKGRFTISRDNAKTTLYLQMNSLRPEDTAVYYCTIGGSLSVSSQGTLVTVSSHHHHHH

SEQ ID NO: 438 - protein, 766 aa, Artificial Sequence
  Description of Artificial Sequence: Synthetic polypeptide
  Pro356
EVQLVESGGGLVQPGGSLRLSCAASGRTFSSYAMGWFRQAPGKEREFVVAINWSSGSTYYADSVKGRFTISRDNSKNTLYLQMNSLRAEDTAVYYCAAGYQINSGNYNFKDYEYDYWGQGTLVTVSSGGGSGGGSEVQLVESGGGLVQPGGSLKLSCAASGFTFNKYAINWVRQAPGKGLEWVARIRSKYNNYATYYADQVKDRFTISRDDSKNTAYLQMNNLKTEDTAVYYCVRHANFGNSYISYWAYWGQGTLVTVSSGGGSGGGSQTVVTQEPSLTVSPGGTVTLTCASSTGAVTSGNYPNWVQQKPGQAPRGLIGGTKFLVPGTPARFSGSLLGGKAALTLSGVQPEDEAEYYCTLWYSNRWVFGGGTKLTVLSGGPGPAGMKGLPGSEVQLVESGGGLVQPGNSLRLSCAASGFTFSKFGMSWVRQAPGKGLEWVSSISGSGRDTLYAESVKGRFTISRDNAKTTLYLQMNSLRPEDTAVYYCTIGGSLSVSSQGTLVTVSSGGGGSGGGSQTVVTQEPSLTVSPGGTVTLTCGSSTGAVTSGNYPNWVQQKPGQAPRGLIGDYKDDDDKGTPARFSGSLLGGKAALTLSGVQPEDEAEYYCVLWYSNRWVFGGGTKLTVLGGGSGGGSEVQLVESGGGLVQPGGSLKLSCAASGFTFNKYAMNWVRQAPGKGLEWVARIRSKYDYKDDDDKADSVKDRFTISRDDSKNTAYLQMNNLKTEDTAVYYCVRHGNFGNSYISYWAYWGQGTLVTVSSHHHHHH

SEQ ID NO: 439 - protein, 763 aa, Artificial Sequence
  Description of Artificial Sequence: Synthetic polypeptide
  Pro359
QVQLQESGGGLVQPGGSLRLSCAPSRRTFHTYHMGWFRQAPGKEREFVAVINWSGGSTVYADSVKGRFTISRDNSKNTLYLQMNSLRAEDTAVYYCAAGGATTQRATEASYDYWGQGTLVTVSSGGGSGGGSEVQLVESGGGLVQPGGSLKLSCAASGFTFNKYAINWVRQAPGKGLEWVARIRSKYNNYATYYADQVKDRFTISRDDSKNTAYLQMNNLKTEDTAVYYCVRHANFGNSYISYWAYWGQGTLVTVSSGGGSGGGSQTVVTQEPSLTVSPGGTVTLTCASSTGAVTSGNYPNWVQQKPGQAPRGLIGGTKFLVPGTPARFSGSLLGGKAALTLSGVQPEDEAEYYCTLWYSNRWVFGGGTKLTVLSGGPGPAGMKGLPGSEVQLVESGGGLVQPGNSLRLSCAASGFTFSKFGMSWVRQAPGKGLEWVSSISGSGRDTLYAESVKGRFTISRDNAKTTLYLQMNSLRPEDTAVYYCTIGGSLSVSSQGTLVTVSSGGGGSGGGSQTVVTQEPSLTVSPGGTVTLTCGSSTGAVTSGNYPNWVQQKPGQAPRGLIGDYKDDDDKGTPARFSGSLLGGKAALTLSGVQPEDEAEYYCVLWYSNRWVFGGGTKLTVLGGGSGGGSEVQLVESGGGLVQPGGSLKLSCAASGFTFNKYAMNWVRQAPGKGLEWVARIRSKYDYKDDDDKADSVKDRFTISRDDSKNTAYLQMNNLKTEDTAVYYCVRHGNFGNSYISYWAYWGQGTLVTVSSHHHHHH

SEQ ID NO: 440 - protein, 752 aa, Artificial Sequence
  Description of Artificial Sequence: Synthetic polypeptide
  Pro364
QVQLVESGGGLVQPGGSLRLSCAAPGNTFSISAMGWYRQAPGKQREWVAVTHSDYSTNYADSVKGRFTISRDNSKNTLYLQMNSLRAEDTAVYYCKHYGIDYWGQGTLVTVSSGGGSGGGSEVQLVESGGGLVQPGGSLKLSCAASGFTFNKYAINWVRQAPGKGLEWVARIRSKYNNYATYYADQVKDRFTISRDDSKNTAYLQMNNLKTEDTAVYYCVRHANFGNSYISYWAYWGQGTLVTVSSGGGSGGGSQTVVTQEPSLTVSPGGTVTLTCASSTGAVTSGNYPNWVQQKPGQAPRGLIGGTKFLVPGTPARFSGSLLGGKAALTLSGVQPEDEAEYYCTLWYSNRWVFGGGTKLTVLSGGPGPAGMKGLPGSEVQLVESGGGLVQPGNSLRLSCAASGFTFSKFGMSWVRQAPGKGLEWVSSISGSGRDTLYAESVKGRFTISRDNAKTTLYLQMNSLRPEDTAVYYCTIGGSLSVSSQGTLVTVSSGGGGSGGGSQTVVTQEPSLTVSPGGTVTLTCGSSTGAVTSGNYPNWVQQKPGQAPRGLIGDYKDDDDKGTPARFSGSLLGGKAALTLSGVQPEDEAEYYCVLWYSNRWVFGGGTKLTVLGGGSGGGSEVQLVESGGGLVQPGGSLKLSCAASGFTFNKYAMNWVRQAPGKGLEWVARIRSKYDYKDDDDKADSVKDRFTISRDDSKNTAYLQMNNLKTEDTAVYYCVRHGNFGNSYISYWAYWGQGTLVTVSSHHHHHH

SEQ ID NO: 441 - protein, 753 aa, Artificial Sequence
  Description of Artificial Sequence: Synthetic polypeptide
  Pro388
QVQLVESGGGLVQPGGSLRLSCAASGFTVSNSVMAWYRQTPGNEREFVAIINSIGITNYADSVKGRFTISRDNSKNTLYLQMNSLRAEDTAVYVCNRNFDRIYWGQGTLVTVSSGGGSGGGSEVQLVESGGGLVQPGGSLKLSCAASGFTFNKYAINWVRQAPGKGLEWVARIRSKYNNYATYYADQVKDRFTISRDDSKNTAYLQMNNLKTEDTAVYYCVRHANFGNSYISYWAYWGQGTLVTVSSGGGSGGGSQTVVTQEPSLTVSPGGTVTLTCASSTGAVTSGNYPNWVQQKPGQAPRGLIGGTKFLVPGTPARFSGSLLGGKAALTLSGVQPEDEAEYYCTLWYSNRWVFGGGTKLTVLSGGPGPAGMKGLPGSEVQLVESGGGLVQPGNSLRLSCAASGFTFSKFGMSWVRQAPGKGLEWVSSISGSGRDTLYAESVKGRFTISRDNAKTTLYLQMNSLRPEDTAVYYCTIGGSLSVSSQGTLVTVSSGGGGSGGGSQTVVTQEPSLTVSPGGTVTLTCGSSTGAVTSGNYPNWVQQKPGQAPRGLIGDYKDDDDKGTPARFSGSLLGGKAALTLSGVQPEDEAEYYCVLWYSNRWVFGGGTKLTVLGGGSGGGSEVQLVESGGGLVQPGGSLKLSCAASGFTFNKYAMNWVRQAPGKGLEWVARIRSKYDYKDDDDKADSVKDRFTISRDDSKNTAYLQMNNLKTEDTAVYYCVRHGNFGNSYISYWAYWGQGTLVTVSSHHHHHH

SEQ ID NO: 442 - protein, 896 aa, Artificial Sequence; identical to SEQ ID NO: 427
  Description of Artificial Sequence: Synthetic polypeptide
  Pro429

SEQ ID NO: 443 - protein, 895 aa, Artificial Sequence; identical to SEQ ID NO: 428
  Description of Artificial Sequence: Synthetic polypeptide
  Pro430

SEQ ID NO: 444 - protein, 896 aa, Artificial Sequence; identical to SEQ ID NO: 429
  Description of Artificial Sequence: Synthetic polypeptide
  Pro431

SEQ ID NO: 445 - protein, 896 aa, Artificial Sequence
  Description of Artificial Sequence: Synthetic polypeptide
  Pro432
QVQLVESGGGLVQPGGSLTLSCAASGTGSIFSINLMGWYRQAPGKQRELVARITSGDSTVYADSVKGRFTISRDNSKNTLYLQMNSLRPEDTAVYYCNLLLRSSPGATTPYWGQGTLVTVSSGGGSGGGSEVQLVESGGGLVQPGGSLKLSCAASGFTFNKYAINWVRQAPGKGLEWVARIRSKYNNYATYYADQVKDRFTISRDDSKNTAYLQMNNLKTEDTAVYYCVRHANFGNSYISYWAYWGQGTLVTVSSGGGSGGGSQTVVTQEPSLTVSPGGTVTLTCASSTGAVTSGNYPNWVQQKPGQAPRGLIGGTKFLVPGTPARFSGSLLGGKAALTLSGVQPEDEAEYYCTLWYSNRWVFGGGTKLTVLGGGSGGGSEVQLVESGGGLVQPGGSLRLSCAASGRTFSSYAMGWFRQAPGKEREFVVAINWSSGSTYYADSVKGRFTISRDNSKNTLYLQMNSLRAEDTAVYYCAAGYQINSGNYNFKDYEYDYWGQGTLVTVSSSGGPGPAGMKGLPGSQTVVTQEPSLTVSPGGTVTLTCGSSTGAVTSGNYPNWVQQKPGQAPRGLIGDYKDDDDKGTPARFSGSLLGGKAALTLSGVQPEDEAEYYCVLWYSNRWVFGGGTKLTVLGGGSGGGSEVQLVESGGGLVQPGGSLKLSCAASGFTFNKYAMNWVRQAPGKGLEWVARIRSKYDYKDDDDKADSVKDRFTISRDDSKNTAYLQMNNLKTEDTAVYYCVRHGNFGNSYISYWAYWGQGTLVTVSSGGGGSGGGSEVQLVESGGGLVQPGNSLRLSCAASGFTFSKFGMSWVRQAPGKGLEWVSSISGSGRDTLYAESVKGRFTISRDNAKTTLYLQMNSLRPEDTAVYYCTIGGSLSVSSQGTLVTVSSHHHHHH

SEQ ID NO: 446 - protein, 636 aa, Artificial Sequence
  Description of Artificial Sequence: Synthetic polypeptide
  Pro448
QVQLVESGGGLVQPGGSLRLSCAASGFTVSNSVMAWYRQTPGNEREFVAIINSIGITNYADSVKGRFTISRDNSKNTLYLQMNSLRAEDTAVYVCNRNFDRIYWGQGTLVTVSSGGGGSGGGSQVKLVESGGGVVRPGGSLTLSCAASGRTSRSYGMGWFRQAPGKEREFVSGISWRGDSTGYADSVKGRFTISRDNAKNSLYLQMNSLRAEDTALYYCAAAAGSAWYGTLYEYDYWGQGTLVTVSSGGGGSGGGSEVQLVESGGGLVQPGGSLKLSCAASGFTFNKYAINWVRQAPGKGLEWVARIRSKYNNYATYYADQVKDRFTISRDDSKNTAYLQMNNLKTEDTAVYYCVRHANFGNSYISYWAYWGQGTLVTVSSSGGPGPAGMKGLPGSQTVVTQEPSLTVSPGGTVTLTCGSSTGAVTSGNYPNWVQQKPGQAPRGLIGDYKDDDDKGTPARFSGSLLGGKAALTLSGVQPEDEAEYYCVLWYSNRWVFGGGTKLTVLGGGGSGGGSEVQLVESGGGLVQPGNSLRLSCAASGFTFSKFGMSWVRQAPGKGLEWVSSISGSGRDTLYAESVKGRFTISRDNAKTTLYLQMNSLRPEDTAVYYCTIGGSLSVSSQGTLVTVSSHHHHHH

SEQ ID NO: 447 - protein, 636 aa, Artificial Sequence
  Description of Artificial Sequence: Synthetic polypeptide
  Pro449
QVKLVESGGGVVRPGGSLTLSCAASGRTSRSYGMGWFRQAPGKEREFVSGISWRGDSTGYADSVKGRFTISRDNAKNSLYLQMNSLRAEDTALYYCAAAAGSAWYGTLYEYDYWGQGTLVTVSSGGGGSGGGSQVQLVESGGGLVQPGGSLRLSCAASGFTVSNSVMAWYRQTPGNEREFVAIINSIGITNYADSVKGRFTISRDNSKNTLYLQMNSLRAEDTAVYVCNRNFDRIYWGQGTLVTVSSGGGGSGGGSEVQLVESGGGLVQPGGSLKLSCAASGFTFNKYAINWVRQAPGKGLEWVARIRSKYNNYATYYADQVKDRFTISRDDSKNTAYLQMNNLKTEDTAVYYCVRHANFGNSYISYWAYWGQGTLVTVSSSGGPGPAGMKGLPGSQTVVTQEPSLTVSPGGTVTLTCGSSTGAVTSGNYPNWVQQKPGQAPRGLIGDYKDDDDKGTPARFSGSLLGGKAALTLSGVQPEDEAEYYCVLWYSNRWVFGGGTKLTVLGGGGSGGGSEVQLVESGGGLVQPGNSLRLSCAASGFTFSKFGMSWVRQAPGKGLEWVSSISGSGRDTLYAESVKGRFTISRDNAKTTLYLQMNSLRPEDTAVYYCTIGGSLSVSSQGTLVTVSSHHHHHH

SEQ ID NO: 448 - protein, 636 aa, Artificial Sequence
  Description of Artificial Sequence: Synthetic polypeptide
  Pro450
QVQLVESGGGLVQPGGSLRLSCAASGFTVSNSVMAWYRQTPGNEREFVAIINSIGITNYADSVKGRFTISRDNSKNTLYLQMNSLRAEDTAVYVCNRNFDRIYWGQGTLVTVSSGGGGSGGGSQVKLVESGGGVVRPGGSLTLSCAASGRTSRSYGMGWFRQAPGKEREFVSGISWRGDSTGYADSVKGRFTISRDNAKNSLYLQMNSLRAEDTALYYCAAAAGSAWYGTLYEYDYWGQGTLVTVSSGGGGSGGGSQTVVTQEPSLTVSPGGTVTLTCASSTGAVTSGNYPNWVQQKPGQAPRGLIGGTKFLVPGTPARFSGSLLGGKAALTLSGVQPEDEAEYYCTLWYSNRWVFGGGTKLTVLSGGPGPAGMKGLPGSEVQLVESGGGLVQPGGSLKLSCAASGFTFNKYAMNWVRQAPGKGLEWVARIRSKYDYKDDDDKADSVKDRFTISRDDSKNTAYLQMNNLKTEDTAVYYCVRHGNFGNSYISYWAYWGQGTLVTVSSGGGGSGGGSEVQLVESGGGLVQPGNSLRLSCAASGFTFSKFGMSWVRQAPGKGLEWVSSISGSGRDTLYAESVKGRFTISRDNAKTTLYLQMNSLRPEDTAVYYCTIGGSLSVSSQGTLVTVSSHHHHHH

SEQ ID NO: 449 - protein, 636 aa, Artificial Sequence
  Description of Artificial Sequence: Synthetic polypeptide
  Pro451
QVKLVESGGGVVRPGGSLTLSCAASGRTSRSYGMGWFRQAPGKEREFVSGISWRGDSTGYADSVKGRFTISRDNAKNSLYLQMNSLRAEDTALYYCAAAAGSAWYGTLYEYDYWGQGTLVTVSSGGGGSGGGSQVQLVESGGGLVQPGGSLRLSCAASGFTVSNSVMAWYRQTPGNEREFVAIINSIGITNYADSVKGRFTISRDNSKNTLYLQMNSLRAEDTAVYVCNRNFDRIYWGQGTLVTVSSGGGGSGGGSQTVVTQEPSLTVSPGGTVTLTCASSTGAVTSGNYPNWVQQKPGQAPRGLIGGTKFLVPGTPARFSGSLLGGKAALTLSGVQPEDEAEYYCTLWYSNRWVFGGGTKLTVLSGGPGPAGMKGLPGSEVQLVESGGGLVQPGGSLKLSCAASGFTFNKYAMNWVRQAPGKGLEWVARIRSKYDYKDDDDKADSVKDRFTISRDDSKNTAYLQMNNLKTEDTAVYYCVRHGNFGNSYISYWAYWGQGTLVTVSSGGGGSGGGSEVQLVESGGGLVQPGNSLRLSCAASGFTFSKFGMSWVRQAPGKGLEWVSSISGSGRDTLYAESVKGRFTISRDNAKTTLYLQMNSLRPEDTAVYYCTIGGSLSVSSQGTLVTVSSHHHHHH

SEQ ID NO: 450 - protein, 893 aa, Artificial Sequence
  Description of Artificial Sequence: Synthetic polypeptide
  Pro479
QVQLQESGGGLVQPGGSLRLSCAPSRRTFHTYHMGWFRQAPGKEREFVAVINWSGGSTVYADSVKGRFTISRDNSKNTLYLQMNSLRAEDTAVYYCAAGGATTQRATEASYDYWGQGTLVTVSSGGGSGGGSEVQLVESGGGLVQPGGSLKLSCAASGFTFNKYAINWVRQAPGKGLEWVARIRSKYNNYATYYADQVKDRFTISRDDSKNTAYLQMNNLKTEDTAVYYCVRHANFGNSYISYWAYWGQGTLVTVSSGGGSGGGSQTVVTQEPSLTVSPGGTVTLTCASSTGAVTSGNYPNWVQQKPGQAPRGLIGGTKFLVPGTPARFSGSLLGGKAALTLSGVQPEDEAEYYCTLWYSNRWVFGGGTKLTVLGGGSGGGSQVQLQESGGGLVQPGGSLRLSCEASPRTFSTYSMAWFRQAPGKERSFVAAINWSGGNTSYADSVKGRFTISRDNSKNTLYLQMNSLRAEDTAVYYCAAGGVLAHHNYEYDYWGQGTLVTVSSSGGPGPAGMKGLPGSQTVVTQEPSLTVSPGGTVTLTCGSSTGAVTSGNYPNWVQQKPGQAPRGLIGDYKDDDDKGTPARFSGSLLGGKAALTLSGVQPEDEAEYYCVLWYSNRWVFGGGTKLTVLGGGSGGGSEVQLVESGGGLVQPGGSLKLSCAASGFTFNKYAMNWVRQAPGKGLEWVARIRSKYDYKDDDDKADSVKDRFTISRDDSKNTAYLQMNNLKTEDTAVYYCVRHGNFGNSYISYWAYWGQGTLVTVSSGGGGSGGGSEVQLVESGGGLVQPGNSLRLSCAASGFTFSKFGMSWVRQAPGKGLEWVSSISGSGRDTLYAESVKGRFTISRDNAKTTLYLQMNSLRPEDTAVYYCTIGGSLSVSSQGTLVTVSSHHHHHH

SEQ ID NO: 451 - protein, 893 aa, Artificial Sequence
  Description of Artificial Sequence: Synthetic polypeptide
  Pro480
QVQLQESGGGLVQPGGSLRLSCEASPRTFSTYSMAWFRQAPGKERSFVAAINWSGGNTSYADSVKGRFTISRDNSKNTLYLQMNSLRAEDTAVYYCAAGGVLAHHNYEYDYWGQGTLVTVSSGGGSGGGSEVQLVESGGGLVQPGGSLKLSCAASGFTFNKYAINWVRQAPGKGLEWVARIRSKYNNYATYYADQVKDRFTISRDDSKNTAYLQMNNLKTEDTAVYYCVRHANFGNSYISYWAYWGQGTLVTVSSGGGSGGGSQTVVTQEPSLTVSPGGTVTLTCASSTGAVTSGNYPNWVQQKPGQAPRGLIGGTKFLVPGTPARFSGSLLGGKAALTLSGVQPEDEAEYYCTLWYSNRWVFGGGTKLTVLGGGSGGGSQVQLQESGGGLVQPGGSLRLSCAPSRRTFHTYHMGWFRQAPGKEREFVAVINWSGGSTVYADSVKGRFTISRDNSKNTLYLQMNSLRAEDTAVYYCAAGGATTQRATEASYDYWGQGTLVTVSSSGGPGPAGMKGLPGSQTVVTQEPSLTVSPGGTVTLTCGSSTGAVTSGNYPNWVQQKPGQAPRGLIGDYKDDDDKGTPARFSGSLLGGKAALTLSGVQPEDEAEYYCVLWYSNRWVFGGGTKLTVLGGGSGGGSEVQLVESGGGLVQPGGSLKLSCAASGFTFNKYAMNWVRQAPGKGLEWVARIRSKYDYKDDDDKADSVKDRFTISRDDSKNTAYLQMNNLKTEDTAVYYCVRHGNFGNSYISYWAYWGQGTLVTVSSGGGGSGGGSEVQLVESGGGLVQPGNSLRLSCAASGFTFSKFGMSWVRQAPGKGLEWVSSISGSGRDTLYAESVKGRFTISRDNAKTTLYLQMNSLRPEDTAVYYCTIGGSLSVSSQGTLVTVSSHHHHHH

SEQ ID NO: 452 - protein, 893 aa, Artificial Sequence
  Description of Artificial Sequence: Synthetic polypeptide
  Pro495
QVQLQESGGGLVQPGGSLRLSCAPSRRTFHTYHMGWFRQAPGKEREFVAVINWSGGSTVYADSVKGRFTISRDNSKNTLYLQMNSLRAEDTAVYYCAAGGATTQRATEASYDYWGQGTLVTVSSGGGSGGGSEVQLVESGGGLVQPGGSLKLSCAASGFTFNKYAINWVRQAPGKGLEWVARIRSKYNNYATYYADQVKDRFTISRDDSKNTAYLQMNNLKTEDTAVYYCVRHANFGNSYISYWAYWGQGTLVTVSSGGGSGGGSQTVVTQEPSLTVSPGGTVTLTCASSTGAVTSGNYPNWVQQKPGQAPRGLIGGTKFLVPGTPARFSGSLLGGKAALTLSGVQPEDEAEYYCTLWYSNRWVFGGGTKLTVLGGGSGGGSQVQLQESGGGLVQPGGSLRLSCAPSRRTFHTYHMGWFRQAPGKEREFVAVINWSGGSTVYADSVKGRFTISRDNSKNTLYLQMNSLRAEDTAVYYCAAGGATTQRATEASYDYWGQGTLVTVSSSGGPGPAGMKGLPGSQTVVTQEPSLTVSPGGTVTLTCGSSTGAVTSGNYPNWVQQKPGQAPRGLIGGTKDDAPGTPARFSGSLLGGKAALTLSGVQPEDEAEYYCVLWYSNRWVFGGGTKLTVLGGGSGGGSEVQLVESGGGLVQPGGSLKLSCAASGFTFNKHAMNWVRQAPGKGLEWVARIRSKYNNYATAYADSVKDRFTISRDDSKNTAYLQMNNLKTEDTAVYYCVRHGNFGNSYISYWAYWGQGTLVTVSSGGGGSGGGSEVQLVESGGGLVQPGNSLRLSCAASGFTFSKFGMSWVRQAPGKGLEWVSSISGSGRDTLYAESVKGRFTISRDNAKTTLYLQMNSLRPEDTAVYYCTIGGSLSVSSQGTLVTVSSHHHHHH

SEQ ID NO: 453 - protein, 893 aa, Artificial Sequence
  Description of Artificial Sequence: Synthetic polypeptide
  alpha-LyPD3 h787 COBRA
QVQLLESGGGLVQPGGSLRLSCAASGFTLDYYAIGWFRQAPGKEHEAVSCISSSDGSTYYADSVKGRFTISRDNSKNTLYLQMNSLRAEDTAVYYCATVKSCYSDGYALWGSWGQGTLVTVSSGGGSGGGSEVQLVESGGGLVQPGGSLKLSCAASGFTFNKYAINWVRQAPGKGLEWVARIRSKYNNYATYYADQVKDRFTISRDDSKNTAYLQMNNLKTEDTAVYYCVRHANFGNSYISYWAYWGQGTLVTVSSGGGSGGGSQTVVTQEPSLTVSPGGTVTLTCASSTGAVTSGNYPNWVQQKPGQAPRGLIGGTKFLVPGTPARFSGSLLGGKAALTLSGVQPEDEAEYYCTLWYSNRWVFGGGTKLTVLGGGSGGGSQVQLLESGGGLVQPGGSLRLSCAASGFTLDYYAIGWFRQAPGKEHEAVSCISSSDGSTYYADSVKGRFTISRDNSKNTLYLQMNSLRAEDTAVYYCATVKSCYSDGYALWGSWGQGTLVTVSSSGGPGPAGMKGLPGSQTVVTQEPSLTVSPGGTVTLTCGSSTGAVTSGNYPNWVQQKPGQAPRGLIGDYKDDDDKGTPARFSGSLLGGKAALTLSGVQPEDEAEYYCVLWYSNRWVFGGGTKLTVLGGGSGGGSEVQLVESGGGLVQPGGSLKLSCAASGFTFNKYAMNWVRQAPGKGLEWVARIRSKYDYKDDDDKADSVKDRFTISRDDSKNTAYLQMNNLKTEDTAVYYCVRHGNFGNSYISYWAYWGQGTLVTVSSGGGGSGGGSEVQLVESGGGLVQPGNSLRLSCAASGFTFSKFGMSWVRQAPGKGLEWVSSISGSGRDTLYAESVKGRFTISRDNAKTTLYLQMNSLRPEDTAVYYCTIGGSLSVSSQGTLVTVSSHHHHHH

SEQ ID NO: 454 - protein, 893 aa, Artificial Sequence
  Description of Artificial Sequence: Synthetic polypeptide
  alpha-LyPD3 h790 COBRA
QVQLLESGGGLVQPGGSLRLSCAASGFTLDYYSIGWFRQAPGKEREGVSCISSSDGSTYYADSVKGRFTISRDNSKNTLYLQMNSLRAEDTAVYYCATVKSCYVDGYILWGSWGQGTLVTVSSGGGSGGGSEVQLVESGGGLVQPGGSLKLSCAASGFTFNKYAINWVRQAPGKGLEWVARIRSKYNNYATYYADQVKDRFTISRDDSKNTAYLQMNNLKTEDTAVYYCVRHANFGNSYISYWAYWGQGTLVTVSSGGGSGGGSQTVVTQEPSLTVSPGGTVTLTCASSTGAVTSGNYPNWVQQKPGQAPRGLIGGTKFLVPGTPARFSGSLLGGKAALTLSGVQPEDEAEYYCTLWYSNRWVFGGGTKLTVLGGGSGGGSQVQLLESGGGLVQPGGSLRLSCAASGFTLDYYSIGWFRQAPGKEREGVSCISSSDGSTYYADSVKGRFTISRDNSKNTLYLQMNSLRAEDTAVYYCATVKSCYVDGYILWGSWGQGTLVTVSSSGGPGPAGMKGLPGSQTVVTQEPSLTVSPGGTVTLTCGSSTGAVTSGNYPNWVQQKPGQAPRGLIGDYKDDDDKGTPARFSGSLLGGKAALTLSGVQPEDEAEYYCVLWYSNRWVFGGGTKLTVLGGGSGGGSEVQLVESGGGLVQPGGSLKLSCAASGFTFNKYAMNWVRQAPGKGLEWVARIRSKYDYKDDDDKADSVKDRFTISRDDSKNTAYLQMNNLKTEDTAVYYCVRHGNFGNSYISYWAYWGQGTLVTVSSGGGGSGGGSEVQLVESGGGLVQPGNSLRLSCAASGFTFSKFGMSWVRQAPGKGLEWVSSISGSGRDTLYAESVKGRFTISRDNAKTTLYLQMNSLRPEDTAVYYCTIGGSLSVSSQGTLVTVSSHHHHHH

SEQ ID NO: 455 - protein, 889 aa, Artificial Sequence
  Description of Artificial Sequence: Synthetic polypeptide
  alpha-LyPD3 H804 COBRA
QVQLLESGGGLVQPGGSLRLSCAASGFTLDYYAIGWFRQAPGKEHEGVSCISSSDGSTYYADSVKGRFTISRDNSKNTLYLQMNSLRAEDTAVYYCATVRSCASPYELGSWGQGTLVTVSSGGGSGGGSEVQLVESGGGLVQPGGSLKLSCAASGFTFNKYAINWVRQAPGKGLEWVARIRSKYNNYATYYADQVKDRFTISRDDSKNTAYLQMNNLKTEDTAVYYCVRHANFGNSYISYWAYWGQGTLVTVSSGGGSGGGSQTVVTQEPSLTVSPGGTVTLTCASSTGAVTSGNYPNWVQQKPGQAPRGLIGGTKFLVPGTPARFSGSLLGGKAALTLSGVQPEDEAEYYCTLWYSNRWVFGGGTKLTVLGGGSGGGSQVQLLESGGGLVQPGGSLRLSCAASGFTLDYYAIGWFRQAPGKEHEGVSCISSSDGSTYYADSVKGRFTISRDNSKNTLYLQMNSLRAEDTAVYYCATVRSCASPYELGSWGQGTLVTVSSSGGPGPAGMKGLPGSQTVVTQEPSLTVSPGGTVTLTCGSSTGAVTSGNYPNWVQQKPGQAPRGLIGDYKDDDDKGTPARFSGSLLGGKAALTLSGVQPEDEAEYYCVLWYSNRWVFGGGTKLTVLGGGSGGGSEVQLVESGGGLVQPGGSLKLSCAASGFTFNKYAMNWVRQAPGKGLEWVARIRSKYDYKDDDDKADSVKDRFTISRDDSKNTAYLQMNNLKTEDTAVYYCVRHGNFGNSYISYWAYWGQGTLVTVSSGGGGSGGGSEVQLVESGGGLVQPGNSLRLSCAASGFTFSKFGMSWVRQAPGKGLEWVSSISGSGRDTLYAESVKGRFTISRDNAKTTLYLQMNSLRPEDTAVYYCTIGGSLSVSSQGTLVTVSSHHHHHH

SEQ ID NO: 456 - protein, 895 aa, Artificial Sequence
  Description of Artificial Sequence: Synthetic polypeptide
  alpha-LyPD3 h773 COBRA
QVQLVESGGGLVQPGGSLRLSCAASGRSFSSYGMGWFRQAPGKEREIVAAISWGGSAVYYANSVKGRFTISRDNSKNTLYLQMNSLRAEDTAVYYCAANRQGRALVRKEFYDYWGQGTLVTVSSGGGSGGGSEVQLVESGGGLVQPGGSLKLSCAASGFTFNKYAINWVRQAPGKGLEWVARIRSKYNNYATYYADQVKDRFTISRDDSKNTAYLQMNNLKTEDTAVYYCVRHANFGNSYISYWAYWGQGTLVTVSSGGGSGGGSQTVVTQEPSLTVSPGGTVTLTCASSTGAVTSGNYPNWVQQKPGQAPRGLIGGTKFLVPGTPARFSGSLLGGKAALTLSGVQPEDEAEYYCTLWYSNRWVFGGGTKLTVLGGGSGGGSQVQLVESGGGLVQPGGSLRLSCAASGRSFSSYGMGWFRQAPGKEREIVAAISWGGSAVYYANSVKGRFTISRDNSKNTLYLQMNSLRAEDTAVYYCAANRQGRALVRKEFYDYWGQGTLVTVSSSGGPGPAGMKGLPGSQTVVTQEPSLTVSPGGTVTLTCGSSTGAVTSGNYPNWVQQKPGQAPRGLIGDYKDDDDKGTPARFSGSLLGGKAALTLSGVQPEDEAEYYCVLWYSNRWVFGGGTKLTVLGGGSGGGSEVQLVESGGGLVQPGGSLKLSCAASGFTFNKYAMNWVRQAPGKGLEWVARIRSKYDYKDDDDKADSVKDRFTISRDDSKNTAYLQMNNLKTEDTAVYYCVRHGNFGNSYISYWAYWGQGTLVTVSSGGGGSGGGSEVQLVESGGGLVQPGNSLRLSCAASGFTFSKFGMSWVRQAPGKGLEWVSSISGSGRDTLYAESVKGRFTISRDNAKTTLYLQMNSLRPEDTAVYYCTIGGSLSVSSQGTLVTVSSHHHHHH

SEQ ID NO: 457 - protein, 881 aa, Artificial Sequence
  Description of Artificial Sequence: Synthetic polypeptide
  alpha-LyPD3 h840 COBRA
QVQLLESGGGKVQPGGSLRLSCVVSGDTSSIYLMGWYRQTPGKQRELVAHIRGNGRTNYADSVKGRFTISRDNSKNTLYLQMNSLRAEDTAVYYCNVRNFWGSAEYWGQGTLVTVSSGGGSGGGSEVQLVESGGGLVQPGGSLKLSCAASGFTFNKYAINWVRQAPGKGLEWVARIRSKYNNYATYYADQVKDRFTISRDDSKNTAYLQMNNLKTEDTAVYYCVRHANFGNSYISYWAYWGQGTLVTVSSGGGSGGGSQTVVTQEPSLTVSPGGTVTLTCASSTGAVTSGNYPNWVQQKPGQAPRGLIGGTKFLVPGTPARFSGSLLGGKAALTLSGVQPEDEAEYYCTLWYSNRWVFGGGTKLTVLGGGSGGGSQVQLLESGGGKVQPGGSLRLSCVVSGDTSSIYLMGWYRQTPGKQRELVAHIRGNGRTNYADSVKGRFTISRDNSKNTLYLQMNSLRAEDTAVYYCNVRNFWGSAEYWGQGTLVTVSSSGGPGPAGMKGLPGSQTVVTQEPSLTVSPGGTVTLTCGSSTGAVTSGNYPNWVQQKPGQAPRGLIGDYKDDDDKGTPARFSGSLLGGKAALTLSGVQPEDEAEYYCVLWYSNRWVFGGGTKLTVLGGGSGGGSEVQLVESGGGLVQPGGSLKLSCAASGFTFNKYAMNWVRQAPGKGLEWVARIRSKYDYKDDDDKADSVKDRFTISRDDSKNTAYLQMNNLKTEDTAVYYCVRHGNFGNSYISYWAYWGQGTLVTVSSGGGGSGGGSEVQLVESGGGLVQPGNSLRLSCAASGFTFSKFGMSWVRQAPGKGLEWVSSISGSGRDTLYAESVKGRFTISRDNAKTTLYLQMNSLRPEDTAVYYCTIGGSLSVSSQGTLVTVSSHHHHHH

SEQ ID NO: 458 - protein, 895 aa, Artificial Sequence
  Description of Artificial Sequence: Synthetic polypeptide
  alpha-LyPD3 h885 COBRA
QVQLLESGGGLVQPGGSLRLSCVASRGTFSRYSMGWFRQAPGKEREFVGRISWSGDMTYYADSVKGRFTISRDNSKNTLYLQMNSLRAEDTAVYYCAASTLGYVWNHPNMYGYWGHGTLVTVSSGGGSGGGSEVQLVESGGGLVQPGGSLKLSCAASGFTFNKYAINWVRQAPGKGLEWVARIRSKYNNYATYYADQVKDRFTISRDDSKNTAYLQMNNLKTEDTAVYYCVRHANFGNSYISYWAYWGQGTLVTVSSGGGSGGGSQTVVTQEPSLTVSPGGTVTLTCASSTGAVTSGNYPNWVQQKPGQAPRGLIGGTKFLVPGTPARFSGSLLGGKAALTLSGVQPEDEAEYYCTLWYSNRWVFGGGTKLTVLGGGSGGGSQVQLLESGGGLVQPGGSLRLSCVASRGTFSRYSMGWFRQAPGKEREFVGRISWSGDMTYYADSVKGRFTISRDNSKNTLYLQMNSLRAEDTAVYYCAASTLGYVWNHPNMYGYWGHGTLVTVSSSGGPGPAGMKGLPGSQTVVTQEPSLTVSPGGTVTLTCGSSTGAVTSGNYPNWVQQKPGQAPRGLIGDYKDDDDKGTPARFSGSLLGGKAALTLSGVQPEDEAEYYCVLWYSNRWVFGGGTKLTVLGGGSGGGSEVQLVESGGGLVQPGGSLKLSCAASGFTFNKYAMNWVRQAPGKGLEWVARIRSKYDYKDDDDKADSVKDRFTISRDDSKNTAYLQMNNLKTEDTAVYYCVRHGNFGNSYISYWAYWGQGTLVTVSSGGGGSGGGSEVQLVESGGGLVQPGNSLRLSCAASGFTFSKFGMSWVRQAPGKGLEWVSSISGSGRDTLYAESVKGRFTISRDNAKTTLYLQMNSLRPEDTAVYYCTIGGSLSVSSQGTLVTVSSHHHHHH

SEQ ID NO: 459 - protein, 883 aa, Artificial Sequence
  Description of Artificial Sequence: Synthetic polypeptide
  alpha-HER2 1054 COBRA
QVQLQESGGGLVQAGGSLILSCAASGRTFSNYAMGWFRQAPGKEREFVAAINWSGTHTDYADSVKGRFTISRDNVKRTVYLQMNSLKPEDTATYFCSRGWSVFDPDYRGQGTQVTVSSGGGSGGGSEVQLVESGGGLVQPGGSLKLSCAASGFTFNKYAINWVRQAPGKGLEWVARIRSKYNNYATYYADQVKDRFTISRDDSKNTAYLQMNNLKTEDTAVYYCVRHANFGNSYISYWAYWGQGTLVTVSSGGGSGGGSQTVVTQEPSLTVSPGGTVTLTCASSTGAVTSGNYPNWVQQKPGQAPRGLIGGTKFLVPGTPARFSGSLLGGKAALTLSGVQPEDEAEYYCTLWYSNRWVFGGGTKLTVLGGGSGGGSQVQLQESGGGLVQAGGSLILSCAASGRTFSNYAMGWFRQAPGKEREFVAAINWSGTHTDYADSVKGRFTISRDNVKRTVYLQMNSLKPEDTATYFCSRGWSVFDPDYRGQGTQVTVSSSGGPGPAGMKGLPGSQTVVTQEPSLTVSPGGTVTLTCGSSTGAVTSGNYPNWVQQKPGQAPRGLIGDYKDDDDKGTPARFSGSLLGGKAALTLSGVQPEDEAEYYCVLWYSNRWVFGGGTKLTVLGGGSGGGSEVQLVESGGGLVQPGGSLKLSCAASGFTFNKYAMNWVRQAPGKGLEWVARIRSKYDYKDDDDKADSVKDRFTISRDDSKNTAYLQMNNLKTEDTAVYYCVRHGNFGNSYISYWAYWGQGTLVTVSSGGGGSGGGSEVQLVESGGGLVQPGNSLRLSCAASGFTFSKFGMSWVRQAPGKGLEWVSSISGSGRDTLYAESVKGRFTISRDNAKTTLYLQMNSLRPEDTAVYYCTIGGSLSVSSQGTLVTVSSHHHHHH

SEQ ID NO: 460 - protein, 883 aa, Artificial Sequence
  Description of Artificial Sequence: Synthetic polypeptide
  alpha-HER21055 COBRA
QVQLQESGGGLVQPGGSLRLTCEVSGRAISSYAISWFRQAPGEEREFVAAINWSGTHTNYADSVKGRFTISRDNVKNTVYLQMNSLKPEDTATYFCSRGWSVFDPDYRGQGTQVTVSSGGGSGGGSEVQLVESGGGLVQPGGSLKLSCAASGFTFNKYAINWVRQAPGKGLEWVARIRSKYNNYATYYADQVKDRFTISRDDSKNTAYLQMNNLKTEDTAVYYCVRHANFGNSYISYWAYWGQGTLVTVSSGGGSGGGSQTVVTQEPSLTVSPGGTVTLTCASSTGAVTSGNYPNWVQQKPGQAPRGLIGGTKFLVPGTPARFSGSLLGGKAALTLSGVQPEDEAEYYCTLWYSNRWVFGGGTKLTVLGGGSGGGSQVQLQESGGGLVQPGGSLRLTCEVSGRAISSYAISWFRQAPGEEREFVAAINWSGTHTNYADSVKGRFTISRDNVKNTVYLQMNSLKPEDTATYFCSRGWSVFDPDYRGQGTQVTVSSSGGPGPAGMKGLPGSQTVVTQEPSLTVSPGGTVTLTCGSSTGAVTSGNYPNWVQQKPGQAPRGLIGDYKDDDDKGTPARFSGSLLGGKAALTLSGVQPEDEAEYYCVLWYSNRWVFGGGTKLTVLGGGSGGGSEVQLVESGGGLVQPGGSLKLSCAASGFTFNKYAMNWVRQAPGKGLEWVARIRSKYDYKDDDDKADSVKDRFTISRDDSKNTAYLQMNNLKTEDTAVYYCVRHGNFGNSYISYWAYWGQGTLVTVSSGGGGSGGGSEVQLVESGGGLVQPGNSLRLSCAASGFTFSKFGMSWVRQAPGKGLEWVSSISGSGRDTLYAESVKGRFTISRDNAKTTLYLQMNSLRPEDTAVYYCTIGGSLSVSSQGTLVTVSSHHHHHH

SEQ ID NO: 461 - protein, 883 aa, Artificial Sequence
  Description of Artificial Sequence: Synthetic polypeptide
  alpha-HER2 1058 COBRA
QVQLQESGGGLVQPGGSLRLTCAASGRAISSYAISWFRQAPGEEREFVAAINWSGTHTNYADSVKGRFTISRDNVKNTVYLQMNSLKPEDTATYFCSRGWSVFDPDYRGQGTQVTVSSGGGSGGGSEVQLVESGGGLVQPGGSLKLSCAASGFTFNKYAINWVRQAPGKGLEWVARIRSKYNNYATYYADQVKDRFTISRDDSKNTAYLQMNNLKTEDTAVYYCVRHANFGNSYISYWAYWGQGTLVTVSSGGGSGGGSQTVVTQEPSLTVSPGGTVTLTCASSTGAVTSGNYPNWVQQKPGQAPRGLIGGTKFLVPGTPARFSGSLLGGKAALTLSGVQPEDEAEYYCTLWYSNRWVFGGGTKLTVLGGGSGGGSQVQLQESGGGLVQPGGSLRLTCAASGRAISSYAISWFRQAPGEEREFVAAINWSGTHTNYADSVKGRFTISRDNVKNTVYLQMNSLKPEDTATYFCSRGWSVFDPDYRGQGTQVTVSSSGGPGPAGMKGLPGSQTVVTQEPSLTVSPGGTVTLTCGSSTGAVTSGNYPNWVQQKPGQAPRGLIGDYKDDDDKGTPARFSGSLLGGKAALTLSGVQPEDEAEYYCVLWYSNRWVFGGGTKLTVLGGGSGGGSEVQLVESGGGLVQPGGSLKLSCAASGFTFNKYAMNWVRQAPGKGLEWVARIRSKYDYKDDDDKADSVKDRFTISRDDSKNTAYLQMNNLKTEDTAVYYCVRHGNFGNSYISYWAYWGQGTLVTVSSGGGGSGGGSEVQLVESGGGLVQPGNSLRLSCAASGFTFSKFGMSWVRQAPGKGLEWVSSISGSGRDTLYAESVKGRFTISRDNAKTTLYLQMNSLRPEDTAVYYCTIGGSLSVSSQGTLVTVSSHHHHHH

SEQ ID NO: 462 - protein, 883 aa, Artificial Sequence
  Description of Artificial Sequence: Synthetic polypeptide
  alpha-HER2 1059 COBRA
QVQLQESGGGLVQPGGSLRLTCAASGRAISSYAISWFRQAPGEEREFVAAINWSGTHTDYADSVKGRFTISRDNAKNTVYLQMNSLKPEDTAVYFCSRGWSVFDPDYRGQGTQVTVSSGGGSGGGSEVQLVESGGGLVQPGGSLKLSCAASGFTFNKYAINWVRQAPGKGLEWVARIRSKYNNYATYYADQVKDRFTISRDDSKNTAYLQMNNLKTEDTAVYYCVRHANFGNSYISYWAYWGQGTLVTVSSGGGSGGGSQTVVTQEPSLTVSPGGTVTLTCASSTGAVTSGNYPNWVQQKPGQAPRGLIGGTKFLVPGTPARFSGSLLGGKAALTLSGVQPEDEAEYYCTLWYSNRWVFGGGTKLTVLGGGSGGGSQVQLQESGGGLVQPGGSLRLTCAASGRAISSYAISWFRQAPGEEREFVAAINWSGTHTDYADSVKGRFTISRDNAKNTVYLQMNSLKPEDTAVYFCSRGWSVFDPDYRGQGTQVTVSSSGGPGPAGMKGLPGSQTVVTQEPSLTVSPGGTVTLTCGSSTGAVTSGNYPNWVQQKPGQAPRGLIGDYKDDDDKGTPARFSGSLLGGKAALTLSGVQPEDEAEYYCVLWYSNRWVFGGGTKLTVLGGGSGGGSEVQLVESGGGLVQPGGSLKLSCAASGFTFNKYAMNWVRQAPGKGLEWVARIRSKYDYKDDDDKADSVKDRFTISRDDSKNTAYLQMNNLKTEDTAVYYCVRHGNFGNSYISYWAYWGQGTLVTVSSGGGGSGGGSEVQLVESGGGLVQPGNSLRLSCAASGFTFSKFGMSWVRQAPGKGLEWVSSISGSGRDTLYAESVKGRFTISRDNAKTTLYLQMNSLRPEDTAVYYCTIGGSLSVSSQGTLVTVSSHHHHHH

SEQ ID NO: 463 - protein, 883 aa, Artificial Sequence
  Description of Artificial Sequence: Synthetic polypeptide
  alpha-HER2 1065 COBRA
QVQLQESGGGLVQPGGSLRLTCEVSGRAISSYAISWFRQAPGEEREFVAAINWSGTHTNYADSVKGRFTISRDNVKRTVYLQMNSLKPEDTATYFCSRGWSVFDPDYRGQGTQVTVSSGGGSGGGSEVQLVESGGGLVQPGGSLKLSCAASGFTFNKYAINWVRQAPGKGLEWVARIRSKYNNYATYYADQVKDRFTISRDDSKNTAYLQMNNLKTEDTAVYYCVRHANFGNSYISYWAYWGQGTLVTVSSGGGSGGGSQTVVTQEPSLTVSPGGTVTLTCASSTGAVTSGNYPNWVQQKPGQAPRGLIGGTKFLVPGTPARFSGSLLGGKAALTLSGVQPEDEAEYYCTLWYSNRWVFGGGTKLTVLGGGSGGGSQVQLQESGGGLVQPGGSLRLTCEVSGRAISSYAISWFRQAPGEEREFVAAINWSGTHTNYADSVKGRFTISRDNVKRTVYLQMNSLKPEDTATYFCSRGWSVFDPDYRGQGTQVTVSSSGGPGPAGMKGLPGSQTVVTQEPSLTVSPGGTVTLTCGSSTGAVTSGNYPNWVQQKPGQAPRGLIGDYKDDDDKGTPARFSGSLLGGKAALTLSGVQPEDEAEYYCVLWYSNRWVFGGGTKLTVLGGGSGGGSEVQLVESGGGLVQPGGSLKLSCAASGFTFNKYAMNWVRQAPGKGLEWVARIRSKYDYKDDDDKADSVKDRFTISRDDSKNTAYLQMNNLKTEDTAVYYCVRHGNFGNSYISYWAYWGQGTLVTVSSGGGGSGGGSEVQLVESGGGLVQPGNSLRLSCAASGFTFSKFGMSWVRQAPGKGLEWVSSISGSGRDTLYAESVKGRFTISRDNAKTTLYLQMNSLRPEDTAVYYCTIGGSLSVSSQGTLVTVSSHHHHHH

SEQ ID NO: 464 - protein, 883 aa, Artificial Sequence
  Description of Artificial Sequence: Synthetic polypeptide
  alpha-HER2 1090 COBRA
QVQLQESGGGLVQTGGSLRLTCEVSGRAISSYAISWFRQAPGEEREFVAAINWSGTHTNYADSVKGRFTISRDNVKNTVYLQMNSLKPEDTATYFCSRGWSLFDPDYRGQGTQVTVSSGGGSGGGSEVQLVESGGGLVQPGGSLKLSCAASGFTFNKYAINWVRQAPGKGLEWVARIRSKYNNYATYYADQVKDRFTISRDDSKNTAYLQMNNLKTEDTAVYYCVRHANFGNSYISYWAYWGQGTLVTVSSGGGSGGGSQTVVTQEPSLTVSPGGTVTLTCASSTGAVTSGNYPNWVQQKPGQAPRGLIGGTKFLVPGTPARFSGSLLGGKAALTLSGVQPEDEAEYYCTLWYSNRWVFGGGTKLTVLGGGSGGGSQVQLQESGGGLVQTGGSLRLTCEVSGRAISSYAISWFRQAPGEEREFVAAINWSGTHTNYADSVKGRFTISRDNVKNTVYLQMNSLKPEDTATYFCSRGWSLFDPDYRGQGTQVTVSSSGGPGPAGMKGLPGSQTVVTQEPSLTVSPGGTVTLTCGSSTGAVTSGNYPNWVQQKPGQAPRGLIGDYKDDDDKGTPARFSGSLLGGKAALTLSGVQPEDEAEYYCVLWYSNRWVFGGGTKLTVLGGGSGGGSEVQLVESGGGLVQPGGSLKLSCAASGFTFNKYAMNWVRQAPGKGLEWVARIRSKYDYKDDDDKADSVKDRFTISRDDSKNTAYLQMNNLKTEDTAVYYCVRHGNFGNSYISYWAYWGQGTLVTVSSGGGGSGGGSEVQLVESGGGLVQPGNSLRLSCAASGFTFSKFGMSWVRQAPGKGLEWVSSISGSGRDTLYAESVKGRFTISRDNAKTTLYLQMNSLRPEDTAVYYCTIGGSLSVSSQGTLVTVSSHHHHHH

SEQ ID NO: 465 - protein, 889 aa, Artificial Sequence
  Description of Artificial Sequence: Synthetic polypeptide
  alpha-HER2 1091 COBRA
QVQLQESGGGLVQPGGSLRLSCAASGFTFDDYAMSWVRQAPGKGLEWVSSINWSGTHTDYADSVKGRFTISRDNAKNTLYLQMNSLKSEDSAVYYCVKGWRLTGGYYDSVQGQGTQVTVSSGGGSGGGSEVQLVESGGGLVQPGGSLKLSCAASGFTFNKYAINWVRQAPGKGLEWVARIRSKYNNYATYYADQVKDRFTISRDDSKNTAYLQMNNLKTEDTAVYYCVRHANFGNSYISYWAYWGQGTLVTVSSGGGSGGGSQTVVTQEPSLTVSPGGTVTLTCASSTGAVTSGNYPNWVQQKPGQAPRGLIGGTKFLVPGTPARFSGSLLGGKAALTLSGVQPEDEAEYYCTLWYSNRWVFGGGTKLTVLGGGSGGGSQVQLQESGGGLVQPGGSLRLSCAASGFTFDDYAMSWVRQAPGKGLEWVSSINWSGTHTDYADSVKGRFTISRDNAKNTLYLQMNSLKSEDSAVYYCVKGWRLTGGYYDSVQGQGTQVTVSSSGGPGPAGMKGLPGSQTVVTQEPSLTVSPGGTVTLTCGSSTGAVTSGNYPNWVQQKPGQAPRGLIGDYKDDDDKGTPARFSGSLLGGKAALTLSGVQPEDEAEYYCVLWYSNRWVFGGGTKLTVLGGGSGGGSEVQLVESGGGLVQPGGSLKLSCAASGFTFNKYAMNWVRQAPGKGLEWVARIRSKYDYKDDDDKADSVKDRFTISRDDSKNTAYLQMNNLKTEDTAVYYCVRHGNFGNSYISYWAYWGQGTLVTVSSGGGGSGGGSEVQLVESGGGLVQPGNSLRLSCAASGFTFSKFGMSWVRQAPGKGLEWVSSISGSGRDTLYAESVKGRFTISRDNAKTTLYLQMNSLRPEDTAVYYCTIGGSLSVSSQGTLVTVSSHHHHHH

SEQ ID NO: 466 - protein, 889 aa, Artificial Sequence
  Description of Artificial Sequence: Synthetic polypeptide
  alpha-HER2 1092 COBRA
QVQLQESGGGLVQAGASLRLSCAASGFTFDDYALSWVRQAPGKGLEWVSSINWSGTHTDYADSVKGRFTISRDNAKNTLYLQMNSLKSEDSAVYYCVKGWRLTGGYYDSVQGQGTQVTVSSGGGSGGGSEVQLVESGGGLVQPGGSLKLSCAASGFTFNKYAINWVRQAPGKGLEWVARIRSKYNNYATYYADQVKDRFTISRDDSKNTAYLQMNNLKTEDTAVYYCVRHANFGNSYISYWAYWGQGTLVTVSSGGGSGGGSQTVVTQEPSLTVSPGGTVTLTCASSTGAVTSGNYPNWVQQKPGQAPRGLIGGTKFLVPGTPARFSGSLLGGKAALTLSGVQPEDEAEYYCTLWYSNRWVFGGGTKLTVLGGGSGGGSQVQLQESGGGLVQAGASLRLSCAASGFTFDDYALSWVRQAPGKGLEWVSSINWSGTHTDYADSVKGRFTISRDNAKNTLYLQMNSLKSEDSAVYYCVKGWRLTGGYYDSVQGQGTQVTVSSSGGPGPAGMKGLPGSQTVVTQEPSLTVSPGGTVTLTCGSSTGAVTSGNYPNWVQQKPGQAPRGLIGDYKDDDDKGTPARFSGSLLGGKAALTLSGVQPEDEAEYYCVLWYSNRWVFGGGTKLTVLGGGSGGGSEVQLVESGGGLVQPGGSLKLSCAASGFTFNKYAMNWVRQAPGKGLEWVARIRSKYDYKDDDDKADSVKDRFTISRDDSKNTAYLQMNNLKTEDTAVYYCVRHGNFGNSYISYWAYWGQGTLVTVSSGGGGSGGGSEVQLVESGGGLVQPGNSLRLSCAASGFTFSKFGMSWVRQAPGKGLEWVSSISGSGRDTLYAESVKGRFTISRDNAKTTLYLQMNSLRPEDTAVYYCTIGGSLSVSSQGTLVTVSSHHHHHH

SEQ ID NO: 467 - protein, 889 aa, Artificial Sequence
  Description of Artificial Sequence: Synthetic polypeptide
  alpha-HER2 1097 COBRA
QVQLQESGGGLVQPGGSLRLSCAASGFIFDDYAMTWVRQAPGKGLEWVSSINWSGTHTDYADSVKGRFTISRDNAKNTLYLQMNSLKSEDSAVYYCVKGWRHTDNYYAGVQGQGTQVTVSSGGGSGGGSEVQLVESGGGLVQPGGSLKLSCAASGFTFNKYAINWVRQAPGKGLEWVARIRSKYNNYATYYADQVKDRFTISRDDSKNTAYLQMNNLKTEDTAVYYCVRHANFGNSYISYWAYWGQGTLVTVSSGGGSGGGSQTVVTQEPSLTVSPGGTVTLTCASSTGAVTSGNYPNWVQQKPGQAPRGLIGGTKFLVPGTPARFSGSLLGGKAALTLSGVQPEDEAEYYCTLWYSNRWVFGGGTKLTVLGGGSGGGSQVQLQESGGGLVQPGGSLRLSCAASGFIFDDYAMTWVRQAPGKGLEWVSSINWSGTHTDYADSVKGRFTISRDNAKNTLYLQMNSLKSEDSAVYYCVKGWRHTDNYYAGVQGQGTQVTVSSSGGPGPAGMKGLPGSQTVVTQEPSLTVSPGGTVTLTCGSSTGAVTSGNYPNWVQQKPGQAPRGLIGDYKDDDDKGTPARFSGSLLGGKAALTLSGVQPEDEAEYYCVLWYSNRWVFGGGTKLTVLGGGSGGGSEVQLVESGGGLVQPGGSLKLSCAASGFTFNKYAMNWVRQAPGKGLEWVARIRSKYDYKDDDDKADSVKDRFTISRDDSKNTAYLQMNNLKTEDTAVYYCVRHGNFGNSYISYWAYWGQGTLVTVSSGGGGSGGGSEVQLVESGGGLVQPGNSLRLSCAASGFTFSKFGMSWVRQAPGKGLEWVSSISGSGRDTLYAESVKGRFTISRDNAKTTLYLQMNSLRPEDTAVYYCTIGGSLSVSSQGTLVTVSSHHHHHH

SEQ ID NO: 468 - protein, 883 aa, Artificial Sequence
  Description of Artificial Sequence: Synthetic polypeptide
  alpha-HER2 1118 COBRA
QVQLQESGGGLVQAGGSLRLSCAASGFTFDDYAMSWVRQTPGKGLEWVSSINWSGTHTNYADSVKGRFTISRDNAKKTLYLQMNSLKSEDTAVYYCARGWMVVPDSTRGQGTQVTVSSGGGSGGGSEVQLVESGGGLVQPGGSLKLSCAASGFTFNKYAINWVRQAPGKGLEWVARIRSKYNNYATYYADQVKDRFTISRDDSKNTAYLQMNNLKTEDTAVYYCVRHANFGNSYISYWAYWGQGTLVTVSSGGGSGGGSQTVVTQEPSLTVSPGGTVTLTCASSTGAVTSGNYPNWVQQKPGQAPRGLIGGTKFLVPGTPARFSGSLLGGKAALTLSGVQPEDEAEYYCTLWYSNRWVFGGGTKLTVLGGGSGGGSQVQLQESGGGLVQAGGSLRLSCAASGFTFDDYAMSWVRQTPGKGLEWVSSINWSGTHTNYADSVKGRFTISRDNAKKTLYLQMNSLKSEDTAVYYCARGWMVVPDSTRGQGTQVTVSSSGGPGPAGMKGLPGSQTVVTQEPSLTVSPGGTVTLTCGSSTGAVTSGNYPNWVQQKPGQAPRGLIGDYKDDDDKGTPARFSGSLLGGKAALTLSGVQPEDEAEYYCVLWYSNRWVFGGGTKLTVLGGGSGGGSEVQLVESGGGLVQPGGSLKLSCAASGFTFNKYAMNWVRQAPGKGLEWVARIRSKYDYKDDDDKADSVKDRFTISRDDSKNTAYLQMNNLKTEDTAVYYCVRHGNFGNSYISYWAYWGQGTLVTVSSGGGGSGGGSEVQLVESGGGLVQPGNSLRLSCAASGFTFSKFGMSWVRQAPGKGLEWVSSISGSGRDTLYAESVKGRFTISRDNAKTTLYLQMNSLRPEDTAVYYCTIGGSLSVSSQGTLVTVSSHHHHHH

SEQ ID NO: 469 - protein, 883 aa, Artificial Sequence
  Description of Artificial Sequence: Synthetic polypeptide
  alpha-HER2 1121 COBRA
QVQLQESGGGLVQAGGSLRLSCAASGFIFSDYAMTWVRQAPGKGLEWVSSINWSGTHTNYADSVKGRFTISRDNAKKTLYLQMNSLKSEDTAVYYCARGWMVVPDSTRGQGTQVTVSSGGGSGGGSEVQLVESGGGLVQPGGSLKLSCAASGFTFNKYAINWVRQAPGKGLEWVARIRSKYNNYATYYADQVKDRFTISRDDSKNTAYLQMNNLKTEDTAVYYCVRHANFGNSYISYWAYWGQGTLVTVSSGGGSGGGSQTVVTQEPSLTVSPGGTVTLTCASSTGAVTSGNYPNWVQQKPGQAPRGLIGGTKFLVPGTPARFSGSLLGGKAALTLSGVQPEDEAEYYCTLWYSNRWVFGGGTKLTVLGGGSGGGSQVQLQESGGGLVQAGGSLRLSCAASGFIFSDYAMTWVRQAPGKGLEWVSSINWSGTHTNYADSVKGRFTISRDNAKKTLYLQMNSLKSEDTAVYYCARGWMVVPDSTRGQGTQVTVSSSGGPGPAGMKGLPGSQTVVTQEPSLTVSPGGTVTLTCGSSTGAVTSGNYPNWVQQKPGQAPRGLIGDYKDDDDKGTPARFSGSLLGGKAALTLSGVQPEDEAEYYCVLWYSNRWVFGGGTKLTVLGGGSGGGSEVQLVESGGGLVQPGGSLKLSCAASGFTFNKYAMNWVRQAPGKGLEWVARIRSKYDYKDDDDKADSVKDRFTISRDDSKNTAYLQMNNLKTEDTAVYYCVRHGNFGNSYISYWAYWGQGTLVTVSSGGGGSGGGSEVQLVESGGGLVQPGNSLRLSCAASGFTFSKFGMSWVRQAPGKGLEWVSSISGSGRDTLYAESVKGRFTISRDNAKTTLYLQMNSLRPEDTAVYYCTIGGSLSVSSQGTLVTVSSHHHHHH

SEQ ID NO: 470 - protein, 873 aa, Artificial Sequence
  Description of Artificial Sequence: Synthetic polypeptide
  alpha-HER2 1134 COBRA
QVQLQESGGGLVQAGGSLRLSCAASGRIFSAAVMAWYRQPPGEQRELVASITHRGFTRYADSVKDRFTISRDNVNNTMYLQMNRLSPEDTAIYYCRLLNGDYWGQGTQVTVSSGGGSGGGSEVQLVESGGGLVQPGGSLKLSCAASGFTFNKYAINWVRQAPGKGLEWVARIRSKYNNYATYYADQVKDRFTISRDDSKNTAYLQMNNLKTEDTAVYYCVRHANFGNSYISYWAYWGQGTLVTVSSGGGSGGGSQTVVTQEPSLTVSPGGTVTLTCASSTGAVTSGNYPNWVQQKPGQAPRGLIGGTKFLVPGTPARFSGSLLGGKAALTLSGVQPEDEAEYYCTLWYSNRWVFGGGTKLTVLGGGSGGGSQVQLQESGGGLVQAGGSLRLSCAASGRIFSAAVMAWYRQPPGEQRELVASITHRGFTRYADSVKDRFTISRDNVNNTMYLQMNRLSPEDTAIYYCRLLNGDYWGQGTQVTVSSSGGPGPAGMKGLPGSQTVVTQEPSLTVSPGGTVTLTCGSSTGAVTSGNYPNWVQQKPGQAPRGLIGDYKDDDDKGTPARFSGSLLGGKAALTLSGVQPEDEAEYYCVLWYSNRWVFGGGTKLTVLGGGSGGGSEVQLVESGGGLVQPGGSLKLSCAASGFTFNKYAMNWVRQAPGKGLEWVARIRSKYDYKDDDDKADSVKDRFTISRDDSKNTAYLQMNNLKTEDTAVYYCVRHGNFGNSYISYWAYWGQGTLVTVSSGGGGSGGGSEVQLVESGGGLVQPGNSLRLSCAASGFTFSKFGMSWVRQAPGKGLEWVSSISGSGRDTLYAESVKGRFTISRDNAKTTLYLQMNSLRPEDTAVYYCTIGGSLSVSSQGTLVTVSSHHHHHH

SEQ ID NO: 471 - protein, 883 aa, Artificial Sequence
  Description of Artificial Sequence: Synthetic polypeptide
  alpha-HER2 1138 COBRA
QVQLQESGGGLVQPGGSLRLSCAASGFTFDDYAMSWVRQAPGKEMEWVSGINWSGTHTRYADSVKGRFTISRDNAKNTLDLQMNSLISEDTAVYYCARGFAADSRSTRGQGTQVTVSSGGGSGGGSEVQLVESGGGLVQPGGSLKLSCAASGFTFNKYAINWVRQAPGKGLEWVARIRSKYNNYATYYADQVKDRFTISRDDSKNTAYLQMNNLKTEDTAVYYCVRHANFGNSYISYWAYWGQGTLVTVSSGGGSGGGSQTVVTQEPSLTVSPGGTVTLTCASSTGAVTSGNYPNWVQQKPGQAPRGLIGGTKFLVPGTPARFSGSLLGGKAALTLSGVQPEDEAEYYCTLWYSNRWVFGGGTKLTVLGGGSGGGSQVQLQESGGGLVQPGGSLRLSCAASGFTFDDYAMSWVRQAPGKEMEWVSGINWSGTHTRYADSVKGRFTISRDNAKNTLDLQMNSLISEDTAVYYCARGFAADSRSTRGQGTQVTVSSSGGPGPAGMKGLPGSQTVVTQEPSLTVSPGGTVTLTCGSSTGAVTSGNYPNWVQQKPGQAPRGLIGDYKDDDDKGTPARFSGSLLGGKAALTLSGVQPEDEAEYYCVLWYSNRWVFGGGTKLTVLGGGSGGGSEVQLVESGGGLVQPGGSLKLSCAASGFTFNKYAMNWVRQAPGKGLEWVARIRSKYDYKDDDDKADSVKDRFTISRDDSKNTAYLQMNNLKTEDTAVYYCVRHGNFGNSYISYWAYWGQGTLVTVSSGGGGSGGGSEVQLVESGGGLVQPGNSLRLSCAASGFTFSKFGMSWVRQAPGKGLEWVSSISGSGRDTLYAESVKGRFTISRDNAKTTLYLQMNSLRPEDTAVYYCTIGGSLSVSSQGTLVTVSSHHHHHH

SEQ ID NO: 472 - protein, 883 aa, Artificial Sequence
  Description of Artificial Sequence: Synthetic polypeptide
  alpha-HER2 1139 COBRA
QVQLQESGGGLVQPGGSLRLSCAASGFTFDDYAMSWIRQAPGKEMEWVSGINWSGTHTRYADSVKGRFTISRDNAKNTLDLQMNSLISEDTAVYYCARGFAADSRSTRGQGTQVTVSSGGGSGGGSEVQLVESGGGLVQPGGSLKLSCAASGFTFNKYAINWVRQAPGKGLEWVARIRSKYNNYATYYADQVKDRFTISRDDSKNTAYLQMNNLKTEDTAVYYCVRHANFGNSYISYWAYWGQGTLVTVSSGGGSGGGSQTVVTQEPSLTVSPGGTVTLTCASSTGAVTSGNYPNWVQQKPGQAPRGLIGGTKFLVPGTPARFSGSLLGGKAALTLSGVQPEDEAEYYCTLWYSNRWVFGGGTKLTVLGGGSGGGSQVQLQESGGGLVQPGGSLRLSCAASGFTFDDYAMSWIRQAPGKEMEWVSGINWSGTHTRYADSVKGRFTISRDNAKNTLDLQMNSLISEDTAVYYCARGFAADSRSTRGQGTQVTVSSSGGPGPAGMKGLPGSQTVVTQEPSLTVSPGGTVTLTCGSSTGAVTSGNYPNWVQQKPGQAPRGLIGDYKDDDDKGTPARFSGSLLGGKAALTLSGVQPEDEAEYYCVLWYSNRWVFGGGTKLTVLGGGSGGGSEVQLVESGGGLVQPGGSLKLSCAASGFTFNKYAMNWVRQAPGKGLEWVARIRSKYDYKDDDDKADSVKDRFTISRDDSKNTAYLQMNNLKTEDTAVYYCVRHGNFGNSYISYWAYWGQGTLVTVSSGGGGSGGGSEVQLVESGGGLVQPGNSLRLSCAASGFTFSKFGMSWVRQAPGKGLEWVSSISGSGRDTLYAESVKGRFTISRDNAKTTLYLQMNSLRPEDTAVYYCTIGGSLSVSSQGTLVTVSSHHHHHH

SEQ ID NO: 473 - protein, 883 aa, Artificial Sequence
  Description of Artificial Sequence: Synthetic polypeptide
  alpha-HER2 1140 COBRA
QVQLQESGGGLVQPGGSLRLSCVASGFTFDDYAMSWVRQAPGKEMEWVSGINWSGTHTRYADSVKGRFTISRDNAKNTLDLQMNSLISEDTAVYYCARGFAADSRSTRGQGTQVTVSSGGGSGGGSEVQLVESGGGLVQPGGSLKLSCAASGFTFNKYAINWVRQAPGKGLEWVARIRSKYNNYATYYADQVKDRFTISRDDSKNTAYLQMNNLKTEDTAVYYCVRHANFGNSYISYWAYWGQGTLVTVSSGGGSGGGSQTVVTQEPSLTVSPGGTVTLTCASSTGAVTSGNYPNWVQQKPGQAPRGLIGGTKFLVPGTPARFSGSLLGGKAALTLSGVQPEDEAEYYCTLWYSNRWVFGGGTKLTVLGGGSGGGSQVQLQESGGGLVQPGGSLRLSCVASGFTFDDYAMSWVRQAPGKEMEWVSGINWSGTHTRYADSVKGRFTISRDNAKNTLDLQMNSLISEDTAVYYCARGFAADSRSTRGQGTQVTVSSSGGPGPAGMKGLPGSQTVVTQEPSLTVSPGGTVTLTCGSSTGAVTSGNYPNWVQQKPGQAPRGLIGDYKDDDDKGTPARFSGSLLGGKAALTLSGVQPEDEAEYYCVLWYSNRWVFGGGTKLTVLGGGSGGGSEVQLVESGGGLVQPGGSLKLSCAASGFTFNKYAMNWVRQAPGKGLEWVARIRSKYDYKDDDDKADSVKDRFTISRDDSKNTAYLQMNNLKTEDTAVYYCVRHGNFGNSYISYWAYWGQGTLVTVSSGGGGSGGGSEVQLVESGGGLVQPGNSLRLSCAASGFTFSKFGMSWVRQAPGKGLEWVSSISGSGRDTLYAESVKGRFTISRDNAKTTLYLQMNSLRPEDTAVYYCTIGGSLSVSSQGTLVTVSSHHHHHH

SEQ ID NO: 474 - protein, 897 aa, Artificial Sequence
  Description of Artificial Sequence: Synthetic polypeptide
  alpha-HER2 1145 COBRA
QVQLQESGGGLVQAGGSLRLSCAASGRIFKNYPMGWFRQPPGKDREFVAAITSSGGTTHYRDSVKGRFTISRDNAKNTVYLQMNSLKPDDTAVYYCAGSSTPWDIPLGPNEVGYWGQGTQVTVSSGGGSGGGSEVQLVESGGGLVQPGGSLKLSCAASGFTFNKYAINWVRQAPGKGLEWVARIRSKYNNYATYYADQVKDRFTISRDDSKNTAYLQMNNLKTEDTAVYYCVRHANFGNSYISYWAYWGQGTLVTVSSGGGSGGGSQTVVTQEPSLTVSPGGTVTLTCASSTGAVTSGNYPNWVQQKPGQAPRGLIGGTKFLVPGTPARFSGSLLGGKAALTLSGVQPEDEAEYYCTLWYSNRWVFGGGTKLTVLGGGSGGGSQVQLQESGGGLVQAGGSLRLSCAASGRIFKNYPMGWFRQPPGKDREFVAAITSSGGTTHYRDSVKGRFTISRDNAKNTVYLQMNSLKPDDTAVYYCAGSSTPWDIPLGPNEVGYWGQGTQVTVSSSGGPGPAGMKGLPGSQTVVTQEPSLTVSPGGTVTLTCGSSTGAVTSGNYPNWVQQKPGQAPRGLIGDYKDDDDKGTPARFSGSLLGGKAALTLSGVQPEDEAEYYCVLWYSNRWVFGGGTKLTVLGGGSGGGSEVQLVESGGGLVQPGGSLKLSCAASGFTFNKYAMNWVRQAPGKGLEWVARIRSKYDYKDDDDKADSVKDRFTISRDDSKNTAYLQMNNLKTEDTAVYYCVRHGNFGNSYISYWAYWGQGTLVTVSSGGGGSGGGSEVQLVESGGGLVQPGNSLRLSCAASGFTFSKFGMSWVRQAPGKGLEWVSSISGSGRDTLYAESVKGRFTISRDNAKTTLYLQMNSLRPEDTAVYYCTIGGSLSVSSQGTLVTVSSHHHHHH

SEQ ID NO: 475 - protein, 897 aa, Artificial Sequence
  Description of Artificial Sequence: Synthetic polypeptide
  alpha-HER2 1146 COBRA
QVQLQESGGGLVQAGGSLRLSCAASGRIFKNYPMGWFRQPPGKDREFVAAITSSGGTTPYRDSVKGRFTISRDNAKNTVYLQMNSLKPEDTAVYYCAGSSTPWDIPLGPNEVGFWGQGTQVTVSSGGGSGGGSEVQLVESGGGLVQPGGSLKLSCAASGFTFNKYAINWVRQAPGKGLEWVARIRSKYNNYATYYADQVKDRFTISRDDSKNTAYLQMNNLKTEDTAVYYCVRHANFGNSYISYWAYWGQGTLVTVSSGGGSGGGSQTVVTQEPSLTVSPGGTVTLTCASSTGAVTSGNYPNWVQQKPGQAPRGLIGGTKFLVPGTPARFSGSLLGGKAALTLSGVQPEDEAEYYCTLWYSNRWVFGGGTKLTVLGGGSGGGSQVQLQESGGGLVQAGGSLRLSCAASGRIFKNYPMGWFRQPPGKDREFVAAITSSGGTTPYRDSVKGRFTISRDNAKNTVYLQMNSLKPEDTAVYYCAGSSTPWDIPLGPNEVGFWGQGTQVTVSSSGGPGPAGMKGLPGSQTVVTQEPSLTVSPGGTVTLTCGSSTGAVTSGNYPNWVQQKPGQAPRGLIGDYKDDDDKGTPARFSGSLLGGKAALTLSGVQPEDEAEYYCVLWYSNRWVFGGGTKLTVLGGGSGGGSEVQLVESGGGLVQPGGSLKLSCAASGFTFNKYAMNWVRQAPGKGLEWVARIRSKYDYKDDDDKADSVKDRFTISRDDSKNTAYLQMNNLKTEDTAVYYCVRHGNFGNSYISYWAYWGQGTLVTVSSGGGGSGGGSEVQLVESGGGLVQPGNSLRLSCAASGFTFSKFGMSWVRQAPGKGLEWVSSISGSGRDTLYAESVKGRFTISRDNAKTTLYLQMNSLRPEDTAVYYCTIGGSLSVSSQGTLVTVSSHHHHHH

SEQ ID NO: 476 - protein, 877 aa, Artificial Sequence
  Description of Artificial Sequence: Synthetic polypeptide
  alpha-HER2 1149 COBRA
QVQLQESGGGLVQAGGSLRLSCVASGNIFGFNVMGWYRQVPGKQRELVAISTGGRSTDYADSAKGRFTISRNNAKDTVYLQMNSLKPEDTAVYYCKMTMASSDYWGQGTQVTVSSGGGSGGGSEVQLVESGGGLVQPGGSLKLSCAASGFTFNKYAINWVRQAPGKGLEWVARIRSKYNNYATYYADQVKDRFTISRDDSKNTAYLQMNNLKTEDTAVYYCVRHANFGNSYISYWAYWGQGTLVTVSSGGGSGGGSQTVVTQEPSLTVSPGGTVTLTCASSTGAVTSGNYPNWVQQKPGQAPRGLIGGTKFLVPGTPARFSGSLLGGKAALTLSGVQPEDEAEYYCTLWYSNRWVFGGGTKLTVLGGGSGGGSQVQLQESGGGLVQAGGSLRLSCVASGNIFGFNVMGWYRQVPGKQRELVAISTGGRSTDYADSAKGRFTISRNNAKDTVYLQMNSLKPEDTAVYYCKMTMASSDYWGQGTQVTVSSSGGPGPAGMKGLPGSQTVVTQEPSLTVSPGGTVTLTCGSSTGAVTSGNYPNWVQQKPGQAPRGLIGDYKDDDDKGTPARFSGSLLGGKAALTLSGVQPEDEAEYYCVLWYSNRWVFGGGTKLTVLGGGSGGGSEVQLVESGGGLVQPGGSLKLSCAASGFTFNKYAMNWVRQAPGKGLEWVARIRSKYDYKDDDDKADSVKDRFTISRDDSKNTAYLQMNNLKTEDTAVYYCVRHGNFGNSYISYWAYWGQGTLVTVSSGGGGSGGGSEVQLVESGGGLVQPGNSLRLSCAASGFTFSKFGMSWVRQAPGKGLEWVSSISGSGRDTLYAESVKGRFTISRDNAKTTLYLQMNSLRPEDTAVYYCTIGGSLSVSSQGTLVTVSSHHHHHH

SEQ ID NO: 477 - protein, 877 aa, Artificial Sequence
  Description of Artificial Sequence: Synthetic polypeptide
  alpha-HER2 1150 COBRA
QVQLQESGGGLVQAGGSLRLSCVASGNIFGFNVMGWYRQVPGKQRELVAISTGGGSTNYADSAKGRFTVSRNNAKDTVYLQMNSLKPEDTAVYYCKMTMASVDYWGQGTQVTVSSGGGSGGGSEVQLVESGGGLVQPGGSLKLSCAASGFTFNKYAINWVRQAPGKGLEWVARIRSKYNNYATYYADQVKDRFTISRDDSKNTAYLQMNNLKTEDTAVYYCVRHANFGNSYISYWAYWGQGTLVTVSSGGGSGGGSQTVVTQEPSLTVSPGGTVTLTCASSTGAVTSGNYPNWVQQKPGQAPRGLIGGTKFLVPGTPARFSGSLLGGKAALTLSGVQPEDEAEYYCTLWYSNRWVFGGGTKLTVLGGGSGGGSQVQLQESGGGLVQAGGSLRLSCVASGNIFGFNVMGWYRQVPGKQRELVAISTGGGSTNYADSAKGRFTVSRNNAKDTVYLQMNSLKPEDTAVYYCKMTMASVDYWGQGTQVTVSSSGGPGPAGMKGLPGSQTVVTQEPSLTVSPGGTVTLTCGSSTGAVTSGNYPNWVQQKPGQAPRGLIGDYKDDDDKGTPARFSGSLLGGKAALTLSGVQPEDEAEYYCVLWYSNRWVFGGGTKLTVLGGGSGGGSEVQLVESGGGLVQPGGSLKLSCAASGFTFNKYAMNWVRQAPGKGLEWVARIRSKYDYKDDDDKADSVKDRFTISRDDSKNTAYLQMNNLKTEDTAVYYCVRHGNFGNSYISYWAYWGQGTLVTVSSGGGGSGGGSEVQLVESGGGLVQPGNSLRLSCAASGFTFSKFGMSWVRQAPGKGLEWVSSISGSGRDTLYAESVKGRFTISRDNAKTTLYLQMNSLRPEDTAVYYCTIGGSLSVSSQGTLVTVSSHHHHHH

SEQ ID NO: 478 - protein, 885 aa, Artificial Sequence
  Description of Artificial Sequence: Synthetic polypeptide
  alpha-HER2 1156 COBRA
QVQLQESGGGLVQAGGSLKVSCAASRNIGSNYAVGWFRQAPGKEREPVAALRWTGSIIGYDDSLRGRFTISKDDAKNTVYLQMNSLKPEDTGVYYCAARILDRSSYDYWGQGTQVTVSSGGGSGGGSEVQLVESGGGLVQPGGSLKLSCAASGFTFNKYAINWVRQAPGKGLEWVARIRSKYNNYATYYADQVKDRFTISRDDSKNTAYLQMNNLKTEDTAVYYCVRHANFGNSYISYWAYWGQGTLVTVSSGGGSGGGSQTVVTQEPSLTVSPGGTVTLTCASSTGAVTSGNYPNWVQQKPGQAPRGLIGGTKFLVPGTPARFSGSLLGGKAALTLSGVQPEDEAEYYCTLWYSNRWVFGGGTKLTVLGGGSGGGSQVQLQESGGGLVQAGGSLKVSCAASRNIGSNYAVGWFRQAPGKEREPVAALRWTGSIIGYDDSLRGRFTISKDDAKNTVYLQMNSLKPEDTGVYYCAARILDRSSYDYWGQGTQVTVSSSGGPGPAGMKGLPGSQTVVTQEPSLTVSPGGTVTLTCGSSTGAVTSGNYPNWVQQKPGQAPRGLIGDYKDDDDKGTPARFSGSLLGGKAALTLSGVQPEDEAEYYCVLWYSNRWVFGGGTKLTVLGGGSGGGSEVQLVESGGGLVQPGGSLKLSCAASGFTFNKYAMNWVRQAPGKGLEWVARIRSKYDYKDDDDKADSVKDRFTISRDDSKNTAYLQMNNLKTEDTAVYYCVRHGNFGNSYISYWAYWGQGTLVTVSSGGGGSGGGSEVQLVESGGGLVQPGNSLRLSCAASGFTFSKFGMSWVRQAPGKGLEWVSSISGSGRDTLYAESVKGRFTISRDNAKTTLYLQMNSLRPEDTAVYYCTIGGSLSVSSQGTLVTVSSHHHHHH

SEQ ID NO: 479 - protein, 897 aa, Artificial Sequence
  Description of Artificial Sequence: Synthetic polypeptide
  alpha-HER2 1158 COBRA
QVQLQESGGGLVQAGGSLRLSCTASGRTFSSYAMGWFRQAPEKEREFVAAITWSGGTTHYAESVKGRFTISRDNAKNTVYLQMNTLEPEDTAVYYCAARINYSTISSNEKMYHYWGQGTQVTVSSGGGSGGGSEVQLVESGGGLVQPGGSLKLSCAASGFTFNKYAINWVRQAPGKGLEWVARIRSKYNNYATYYADQVKDRFTISRDDSKNTAYLQMNNLKTEDTAVYYCVRHANFGNSYISYWAYWGQGTLVTVSSGGGSGGGSQTVVTQEPSLTVSPGGTVTLTCASSTGAVTSGNYPNWVQQKPGQAPRGLIGGTKFLVPGTPARFSGSLLGGKAALTLSGVQPEDEAEYYCTLWYSNRWVFGGGTKLTVLGGGSGGGSQVQLQESGGGLVQAGGSLRLSCTASGRTFSSYAMGWFRQAPEKEREFVAAITWSGGTTHYAESVKGRFTISRDNAKNTVYLQMNTLEPEDTAVYYCAARINYSTISSNEKMYHYWGQGTQVTVSSSGGPGPAGMKGLPGSQTVVTQEPSLTVSPGGTVTLTCGSSTGAVTSGNYPNWVQQKPGQAPRGLIGDYKDDDDKGTPARFSGSLLGGKAALTLSGVQPEDEAEYYCVLWYSNRWVFGGGTKLTVLGGGSGGGSEVQLVESGGGLVQPGGSLKLSCAASGFTFNKYAMNWVRQAPGKGLEWVARIRSKYDYKDDDDKADSVKDRFTISRDDSKNTAYLQMNNLKTEDTAVYYCVRHGNFGNSYISYWAYWGQGTLVTVSSGGGGSGGGSEVQLVESGGGLVQPGNSLRLSCAASGFTFSKFGMSWVRQAPGKGLEWVSSISGSGRDTLYAESVKGRFTISRDNAKTTLYLQMNSLRPEDTAVYYCTIGGSLSVSSQGTLVTVSSHHHHHH

SEQ ID NO: 480 - protein, 893 aa, Artificial Sequence
  Description of Artificial Sequence: Synthetic polypeptide
  alpha-HER2 1159 COBRA
QVQLQESGGGLVQAGGSLRLSCATSGRTFSSLAMGWFRQAPGKERELVAGISWSGSTTYYADSVKGRFAISRDNAKNTVYLQMNSLKPEDTAVYYCAARTSSIATIGREYDYWGQGTQVTVSSGGGSGGGSEVQLVESGGGLVQPGGSLKLSCAASGFTFNKYAINWVRQAPGKGLEWVARIRSKYNNYATYYADQVKDRFTISRDDSKNTAYLQMNNLKTEDTAVYYCVRHANFGNSYISYWAYWGQGTLVTVSSGGGSGGGSQTVVTQEPSLTVSPGGTVTLTCASSTGAVTSGNYPNWVQQKPGQAPRGLIGGTKFLVPGTPARFSGSLLGGKAALTLSGVQPEDEAEYYCTLWYSNRWVFGGGTKLTVLGGGSGGGSQVQLQESGGGLVQAGGSLRLSCATSGRTFSSLAMGWFRQAPGKERELVAGISWSGSTTYYADSVKGRFAISRDNAKNTVYLQMNSLKPEDTAVYYCAARTSSIATIGREYDYWGQGTQVTVSSSGGPGPAGMKGLPGSQTVVTQEPSLTVSPGGTVTLTCGSSTGAVTSGNYPNWVQQKPGQAPRGLIGDYKDDDDKGTPARFSGSLLGGKAALTLSGVQPEDEAEYYCVLWYSNRWVFGGGTKLTVLGGGSGGGSEVQLVESGGGLVQPGGSLKLSCAASGFTFNKYAMNWVRQAPGKGLEWVARIRSKYDYKDDDDKADSVKDRFTISRDDSKNTAYLQMNNLKTEDTAVYYCVRHGNFGNSYISYWAYWGQGTLVTVSSGGGGSGGGSEVQLVESGGGLVQPGNSLRLSCAASGFTFSKFGMSWVRQAPGKGLEWVSSISGSGRDTLYAESVKGRFTISRDNAKTTLYLQMNSLRPEDTAVYYCTIGGSLSVSSQGTLVTVSSHHHHHH

SEQ ID NO: 481 - protein, 885 aa, Artificial Sequence
  Description of Artificial Sequence: Synthetic polypeptide
  alpha-HER2 1160 COBRA
QVQLQESGGGLVQAGGSLRLSCAASGRTFSNERLGWFRQAPGKERELVAAIRWSGVIIGYADSVRGRFTISRDNAKSTVYLQMNSLRPEDTAVYFCAADRGVYGTWDYWGQGTQVTVSSGGGSGGGSEVQLVESGGGLVQPGGSLKLSCAASGFTFNKYAINWVRQAPGKGLEWVARIRSKYNNYATYYADQVKDRFTISRDDSKNTAYLQMNNLKTEDTAVYYCVRHANFGNSYISYWAYWGQGTLVTVSSGGGSGGGSQTVVTQEPSLTVSPGGTVTLTCASSTGAVTSGNYPNWVQQKPGQAPRGLIGGTKFLVPGTPARFSGSLLGGKAALTLSGVQPEDEAEYYCTLWYSNRWVFGGGTKLTVLGGGSGGGSQVQLQESGGGLVQAGGSLRLSCAASGRTFSNERLGWFRQAPGKERELVAAIRWSGVIIGYADSVRGRFTISRDNAKSTVYLQMNSLRPEDTAVYFCAADRGVYGTWDYWGQGTQVTVSSSGGPGPAGMKGLPGSQTVVTQEPSLTVSPGGTVTLTCGSSTGAVTSGNYPNWVQQKPGQAPRGLIGDYKDDDDKGTPARFSGSLLGGKAALTLSGVQPEDEAEYYCVLWYSNRWVFGGGTKLTVLGGGSGGGSEVQLVESGGGLVQPGGSLKLSCAASGFTFNKYAMNWVRQAPGKGLEWVARIRSKYDYKDDDDKADSVKDRFTISRDDSKNTAYLQMNNLKTEDTAVYYCVRHGNFGNSYISYWAYWGQGTLVTVSSGGGGSGGGSEVQLVESGGGLVQPGNSLRLSCAASGFTFSKFGMSWVRQAPGKGLEWVSSISGSGRDTLYAESVKGRFTISRDNAKTTLYLQMNSLRPEDTAVYYCTIGGSLSVSSQGTLVTVSSHHHHHH

SEQ ID NO: 482 - protein, 873 aa, Artificial Sequence
  Description of Artificial Sequence: Synthetic polypeptide
  alpha-HER2 1161 COBRA
QVQLQESGGGLVQPGKSLRLSCAVSGDIFGTYGMAWYRQAPGKQREPVASISIGGIINYADSVKGRFTISRDNVKNTVYLQMNSLKPEDTAVYYCKLLDWNYWGRGTQVTVSSGGGSGGGSEVQLVESGGGLVQPGGSLKLSCAASGFTFNKYAINWVRQAPGKGLEWVARIRSKYNNYATYYADQVKDRFTISRDDSKNTAYLQMNNLKTEDTAVYYCVRHANFGNSYISYWAYWGQGTLVTVSSGGGSGGGSQTVVTQEPSLTVSPGGTVTLTCASSTGAVTSGNYPNWVQQKPGQAPRGLIGGTKFLVPGTPARFSGSLLGGKAALTLSGVQPEDEAEYYCTLWYSNRWVFGGGTKLTVLGGGSGGGSQVQLQESGGGLVQPGKSLRLSCAVSGDIFGTYGMAWYRQAPGKQREPVASISIGGIINYADSVKGRFTISRDNVKNTVYLQMNSLKPEDTAVYYCKLLDWNYWGRGTQVTVSSSGGPGPAGMKGLPGSQTVVTQEPSLTVSPGGTVTLTCGSSTGAVTSGNYPNWVQQKPGQAPRGLIGDYKDDDDKGTPARFSGSLLGGKAALTLSGVQPEDEAEYYCVLWYSNRWVFGGGTKLTVLGGGSGGGSEVQLVESGGGLVQPGGSLKLSCAASGFTFNKYAMNWVRQAPGKGLEWVARIRSKYDYKDDDDKADSVKDRFTISRDDSKNTAYLQMNNLKTEDTAVYYCVRHGNFGNSYISYWAYWGQGTLVTVSSGGGGSGGGSEVQLVESGGGLVQPGNSLRLSCAASGFTFSKFGMSWVRQAPGKGLEWVSSISGSGRDTLYAESVKGRFTISRDNAKTTLYLQMNSLRPEDTAVYYCTIGGSLSVSSQGTLVTVSSHHHHHH

SEQ ID NO: 483 - protein, 901 aa, Artificial Sequence
  Description of Artificial Sequence: Synthetic polypeptide
  alpha-HER2 1162 COBRA
QVQLQESGGGLVQAGGSLRLSCAASGRPFSGNAMGWFRQAPGKEREFVAAISWSGDSTYYADSVKGRFTISRDNDENTAYLQMNSLKPEDTAVYYCAATRSFYSRTYYTRPSDYNYWGPGTQVTVSSGGGSGGGSEVQLVESGGGLVQPGGSLKLSCAASGFTFNKYAINWVRQAPGKGLEWVARIRSKYNNYATYYADQVKDRFTISRDDSKNTAYLQMNNLKTEDTAVYYCVRHANFGNSYISYWAYWGQGTLVTVSSGGGSGGGSQTVVTQEPSLTVSPGGTVTLTCASSTGAVTSGNYPNWVQQKPGQAPRGLIGGTKFLVPGTPARFSGSLLGGKAALTLSGVQPEDEAEYYCTLWYSNRWVFGGGTKLTVLGGGSGGGSQVQLQESGGGLVQAGGSLRLSCAASGRPFSGNAMGWFRQAPGKEREFVAAISWSGDSTYYADSVKGRFTISRDNDENTAYLQMNSLKPEDTAVYYCAATRSFYSRTYYTRPSDYNYWGPGTQVTVSSSGGPGPAGMKGLPGSQTVVTQEPSLTVSPGGTVTLTCGSSTGAVTSGNYPNWVQQKPGQAPRGLIGDYKDDDDKGTPARFSGSLLGGKAALTLSGVQPEDEAEYYCVLWYSNRWVFGGGTKLTVLGGGSGGGSEVQLVESGGGLVQPGGSLKLSCAASGFTFNKYAMNWVRQAPGKGLEWVARIRSKYDYKDDDDKADSVKDRFTISRDDSKNTAYLQMNNLKTEDTAVYYCVRHGNFGNSYISYWAYWGQGTLVTVSSGGGGSGGGSEVQLVESGGGLVQPGNSLRLSCAASGFTFSKFGMSWVRQAPGKGLEWVSSISGSGRDTLYAESVKGRFTISRDNAKTTLYLQMNSLRPEDTAVYYCTIGGSLSVSSQGTLVTVSSHHHHHH

SEQ ID NO: 484 - protein, 897 aa, Artificial Sequence
  Description of Artificial Sequence: Synthetic polypeptide
  alpha-HER2 1163 COBRA
QVQLQESGGGLVQAGGSLRLSCAASGRRFNNYFMGWFRQAPGKEREFVALLRESGDNTYYTNSVKGRFTISRDNARNTVYLQMNSLKPEDTAVYYCAARLDTGFVLYSANSYAYWGQGTQVTVSSGGGSGGGSEVQLVESGGGLVQPGGSLKLSCAASGFTFNKYAINWVRQAPGKGLEWVARIRSKYNNYATYYADQVKDRFTISRDDSKNTAYLQMNNLKTEDTAVYYCVRHANFGNSYISYWAYWGQGTLVTVSSGGGSGGGSQTVVTQEPSLTVSPGGTVTLTCASSTGAVTSGNYPNWVQQKPGQAPRGLIGGTKFLVPGTPARFSGSLLGGKAALTLSGVQPEDEAEYYCTLWYSNRWVFGGGTKLTVLGGGSGGGSQVQLQESGGGLVQAGGSLRLSCAASGRRFNNYFMGWFRQAPGKEREFVALLRESGDNTYYTNSVKGRFTISRDNARNTVYLQMNSLKPEDTAVYYCAARLDTGFVLYSANSYAYWGQGTQVTVSSSGGPGPAGMKGLPGSQTVVTQEPSLTVSPGGTVTLTCGSSTGAVTSGNYPNWVQQKPGQAPRGLIGDYKDDDDKGTPARFSGSLLGGKAALTLSGVQPEDEAEYYCVLWYSNRWVFGGGTKLTVLGGGSGGGSEVQLVESGGGLVQPGGSLKLSCAASGFTFNKYAMNWVRQAPGKGLEWVARIRSKYDYKDDDDKADSVKDRFTISRDDSKNTAYLQMNNLKTEDTAVYYCVRHGNFGNSYISYWAYWGQGTLVTVSSGGGGSGGGSEVQLVESGGGLVQPGNSLRLSCAASGFTFSKFGMSWVRQAPGKGLEWVSSISGSGRDTLYAESVKGRFTISRDNAKTTLYLQMNSLRPEDTAVYYCTIGGSLSVSSQGTLVTVSSHHHHHH

SEQ ID NO: 485 - protein, 902 aa, Artificial Sequence
  Description of Artificial Sequence: Synthetic polypeptide
  Pro824 (aEpCAM h665/aTrop-2 h557)
QVQLLESGGGLVQPGGSLRLSCAASGRTFSDYDMGWFRQGPGKEREFVAAISWSGGHTNYADSVKGRFTISRDNSKNTLYLQMNSLRAEDTAVYYCAADLRFTGGDTTTPETYDYWGQGTLVTVSSGGGSGGGSEVQLVESGGGLVQPGGSLKLSCAASGFTFNKYAINWVRQAPGKGLEWVARIRSKYNNYATYYADQVKDRFTISRDDSKNTAYLQMNNLKTEDTAVYYCVRHANFGNSYISYWAYWGQGTLVTVSSGGGSGGGSQTVVTQEPSLTVSPGGTVTLTCASSTGAVTSGNYPNWVQQKPGQAPRGLIGGTKFLVPGTPARFSGSLLGGKAALTLSGVQPEDEAEYYCTLWYSNRWVFGGGTKLTVLGGGSGGGSQVQLLESGGGLVQPGGSLRLSCAASGRTFSSQSMGWFRQAPGKEREFVSAISWTGANPTYADSVKGRFTISRDNSKNTLYLQMNSLRAEDTAVYYCAADTSGGSYYYERATAETSYDYWGQGTLVTVSSSGGPGPAGMKGLPGSQTVVTQEPSLTVSPGGTVTLTCGSSTGAVTSGNYPNWVQQKPGQAPRGLIGDYKDDDDKGTPARFSGSLLGGKAALTLSGVQPEDEAEYYCVLWYSNRWVFGGGTKLTVLGGGSGGGSEVQLVESGGGLVQPGGSLKLSCAASGFTFNKYAMNWVRQAPGKGLEWVARIRSKYDYKDDDDKADSVKDRFTISRDDSKNTAYLQMNNLKTEDTAVYYCVRHGNFGNSYISYWAYWGQGTLVTVSSGGGGSGGGSEVQLVESGGGLVQPGNSLRLSCAASGFTFSKFGMSWVRQAPGKGLEWVSSISGSGRDTLYAESVKGRFTISRDNAKTTLYLQMNSLRPEDTAVYYCTIGGSLSVSSQGTLVTVSSHHHHHH

SEQ ID NO: 486 - protein, 902 aa, Artificial Sequence
  Description of Artificial Sequence: Synthetic polypeptide
  Pro826 (aTrop-2 h557/aEpCAM h665)
QVQLLESGGGLVQPGGSLRLSCAASGRTFSSQSMGWFRQAPGKEREFVSAISWTGANPTYADSVKGRFTISRDNSKNTLYLQMNSLRAEDTAVYYCAADTSGGSYYYERATAETSYDYWGQGTLVTVSSGGGSGGGSEVQLVESGGGLVQPGGSLKLSCAASGFTFNKYAINWVRQAPGKGLEWVARIRSKYNNYATYYADQVKDRFTISRDDSKNTAYLQMNNLKTEDTAVYYCVRHANFGNSYISYWAYWGQGTLVTVSSGGGSGGGSQTVVTQEPSLTVSPGGTVTLTCASSTGAVTSGNYPNWVQQKPGQAPRGLIGGTKFLVPGTPARFSGSLLGGKAALTLSGVQPEDEAEYYCTLWYSNRWVFGGGTKLTVLGGGSGGGSQVQLLESGGGLVQPGGSLRLSCAASGRTFSDYDMGWFRQGPGKEREFVAAISWSGGHTNYADSVKGRFTISRDNSKNTLYLQMNSLRAEDTAVYYCAADLRFTGGDTTTPETYDYWGQGTLVTVSSSGGPGPAGMKGLPGSQTVVTQEPSLTVSPGGTVTLTCGSSTGAVTSGNYPNWVQQKPGQAPRGLIGDYKDDDDKGTPARFSGSLLGGKAALTLSGVQPEDEAEYYCVLWYSNRWVFGGGTKLTVLGGGSGGGSEVQLVESGGGLVQPGGSLKLSCAASGFTFNKYAMNWVRQAPGKGLEWVARIRSKYDYKDDDDKADSVKDRFTISRDDSKNTAYLQMNNLKTEDTAVYYCVRHGNFGNSYISYWAYWGQGTLVTVSSGGGGSGGGSEVQLVESGGGLVQPGNSLRLSCAASGFTFSKFGMSWVRQAPGKGLEWVSSISGSGRDTLYAESVKGRFTISRDNAKTTLYLQMNSLRPEDTAVYYCTIGGSLSVSSQGTLVTVSSHHHHHH

SEQ ID NO: 487 - protein, 895 aa, Artificial Sequence
  Description of Artificial Sequence: Synthetic polypeptide
  Pro751
QVQLQESGGGLVQPGGSLRLSCEASPRTFSTYSMAWFRQAPGKERSFVAAINWSGGNTYYADSVKGRFTISRDNSKNTLYLQMNSLRAEDTAVYYCAAGGVLAHHNYEYDYWGQGTLVTVSSGGGSGGGSEVQLVESGGGLVQPGGSLKLSCAASGFTFNKYAINWVRQAPGKGLEWVARIRSKYNNYATYYADQVKDRFTISRDDSKNTAYLQMNNLKTEDTAVYYCVRHANFGNSYISYWAYWGQGTLVTVSSGGGSGGGSQTVVTQEPSLTVSPGGTVTLTCASSTGAVTSGNYPNWVQQKPGQAPRGLIGGTKFLVPGTPARFSGSLLGGKAALTLSGVQPEDEAEYYCTLWYSNRWVFGGGTKLTVLGGGSGGGSQVQLLESGGGLVQPGGSLRLSCAASGRTFSDYDMGWFRQGPGKEREFVAAISWSGGHTNYADSVKGRFTISRDNSKNTLYLQMNSLRAEDTAVYYCAADLRFTGGDTTTPETYDYWGQGTLVTVSSSGGPGPAGMKGLPGSQTVVTQEPSLTVSPGGTVTLTCGSSTGAVTSGNYPNWVQQKPGQAPRGLIGDYKDDDDKGTPARFSGSLLGGKAALTLSGVQPEDEAEYYCVLWYSNRWVFGGGTKLTVLGGGSGGGSEVQLVESGGGLVQPGGSLKLSCAASGFTFNKYAMNWVRQAPGKGLEWVARIRSKYDYKDDDDKADSVKDRFTISRDDSKNTAYLQMNNLKTEDTAVYYCVRHGNFGNSYISYWAYWGQGTLVTVSSGGGGSGGGSEVQLVESGGGLVQPGNSLRLSCAASGFTFSKFGMSWVRQAPGKGLEWVSSISGSGRDTLYAESVKGRFTISRDNAKTTLYLQMNSLRPEDTAVYYCTIGGSLSVSSQGTLVTVSSHHHHHH

SEQ ID NO: 488 - protein, 895 aa, Artificial Sequence
  Description of Artificial Sequence: Synthetic polypeptide
  Pro752
QVQLLESGGGLVQPGGSLRLSCAASGRTFSDYDMGWFRQGPGKEREFVAAISWSGGHTNYADSVKGRFTISRDNSKNTLYLQMNSLRAEDTAVYYCAADLRFTGGDTTTPETYDYWGQGTLVTVSSGGGSGGGSEVQLVESGGGLVQPGGSLKLSCAASGFTFNKYAINWVRQAPGKGLEWVARIRSKYNNYATYYADQVKDRFTISRDDSKNTAYLQMNNLKTEDTAVYYCVRHANFGNSYISYWAYWGQGTLVTVSSGGGSGGGSQTVVTQEPSLTVSPGGTVTLTCASSTGAVTSGNYPNWVQQKPGQAPRGLIGGTKFLVPGTPARFSGSLLGGKAALTLSGVQPEDEAEYYCTLWYSNRWVFGGGTKLTVLGGGSGGGSQVQLQESGGGLVQPGGSLRLSCEASPRTFSTYSMAWFRQAPGKERSFVAAINWSGGNTYYADSVKGRFTISRDNSKNTLYLQMNSLRAEDTAVYYCAAGGVLAHHNYEYDYWGQGTLVTVSSSGGPGPAGMKGLPGSQTVVTQEPSLTVSPGGTVTLTCGSSTGAVTSGNYPNWVQQKPGQAPRGLIGDYKDDDDKGTPARFSGSLLGGKAALTLSGVQPEDEAEYYCVLWYSNRWVFGGGTKLTVLGGGSGGGSEVQLVESGGGLVQPGGSLKLSCAASGFTFNKYAMNWVRQAPGKGLEWVARIRSKYDYKDDDDKADSVKDRFTISRDDSKNTAYLQMNNLKTEDTAVYYCVRHGNFGNSYISYWAYWGQGTLVTVSSGGGGSGGGSEVQLVESGGGLVQPGNSLRLSCAASGFTFSKFGMSWVRQAPGKGLEWVSSISGSGRDTLYAESVKGRFTISRDNAKTTLYLQMNSLRPEDTAVYYCTIGGSLSVSSQGTLVTVSSHHHHHH

SEQ ID NO: 489 - protein, 902 aa, Artificial Sequence; identical to SEQ ID NO: 485
  Description of Artificial Sequence: Synthetic polypeptide
  Pro824

SEQ ID NO: 490 - protein, 902 aa, Artificial Sequence; identical to SEQ ID NO: 486
  Description of Artificial Sequence: Synthetic polypeptide
  Pro826

SEQ ID NO: 491 - protein, 893 aa, Artificial Sequence
  Description of Artificial Sequence: Synthetic polypeptide
  Pro1109
QVQLLESGGGLVQPGGSLRLSCATSGRTFSSLAMGWFRQAPGKERELVAGISWSGSTTYYADSVKGRFAISRDNSKNTLYLQMNSLRAEDTAVYYCAARTSSIATIGREYDYWGQGTLVTVSSGGGSGGGSEVQLVESGGGLVQPGGSLKLSCAASGFTFNKYAINWVRQAPGKGLEWVARIRSKYNNYATYYADQVKDRFTISRDDSKNTAYLQMNNLKTEDTAVYYCVRHANFGNSYISYWAYWGQGTLVTVSSGGGSGGGSQTVVTQEPSLTVSPGGTVTLTCASSTGAVTSGNYPNWVQQKPGQAPRGLIGGTKFLVPGTPARFSGSLLGGKAALTLSGVQPEDEAEYYCTLWYSNRWVFGGGTKLTVLGGGSGGGSQVQLLESGGGLVQPGGSLRLSCATSGRTFSSLAMGWFRQAPGKERELVAGISWSGSTTYYADSVKGRFAISRDNSKNTLYLQMNSLRAEDTAVYYCAARTSSIATIGREYDYWGQGTLVTVSSSGGPGPAGMKGLPGSQTVVTQEPSLTVSPGGTVTLTCGSSTGAVTSGNYPNWVQQKPGQAPRGLIGDYKDDDDKGTPARFSGSLLGGKAALTLSGVQPEDEAEYYCVLWYSNRWVFGGGTKLTVLGGGSGGGSEVQLVESGGGLVQPGGSLKLSCAASGFTFNKYAMNWVRQAPGKGLEWVARIRSKYDYKDDDDKADSVKDRFTISRDDSKNTAYLQMNNLKTEDTAVYYCVRHGNFGNSYISYWAYWGQGTLVTVSSGGGGSGGGSEVQLVESGGGLVQPGNSLRLSCAASGFTFSKFGMSWVRQAPGKGLEWVSSISGSGRDTLYAESVKGRFTISRDNAKTTLYLQMNSLRPEDTAVYYCTIGGSLSVSSQGTLVTVSSHHHHHH

SEQ ID NO: 492 - protein, 901 aa, Artificial Sequence
  Description of Artificial Sequence: Synthetic polypeptide
  Pro1111
QVQLLESGGGLVQPGGSLRLSCAASGRPFSGNAMGWFRQAPGKEREFVAAISWSGDSTYYADSVKGRFTISRDNSKNTLYLQMNSLRAEDTAVYYCAATRSFYSRTYYTRPSDYNYWGPGTLVTVSSGGGSGGGSEVQLVESGGGLVQPGGSLKLSCAASGFTFNKYAINWVRQAPGKGLEWVARIRSKYNNYATYYADQVKDRFTISRDDSKNTAYLQMNNLKTEDTAVYYCVRHANFGNSYISYWAYWGQGTLVTVSSGGGSGGGSQTVVTQEPSLTVSPGGTVTLTCASSTGAVTSGNYPNWVQQKPGQAPRGLIGGTKFLVPGTPARFSGSLLGGKAALTLSGVQPEDEAEYYCTLWYSNRWVFGGGTKLTVLGGGSGGGSQVQLLESGGGLVQPGGSLRLSCAASGRPFSGNAMGWFRQAPGKEREFVAAISWSGDSTYYADSVKGRFTISRDNSKNTLYLQMNSLRAEDTAVYYCAATRSFYSRTYYTRPSDYNYWGPGTLVTVSSSGGPGPAGMKGLPGSQTVVTQEPSLTVSPGGTVTLTCGSSTGAVTSGNYPNWVQQKPGQAPRGLIGDYKDDDDKGTPARFSGSLLGGKAALTLSGVQPEDEAEYYCVLWYSNRWVFGGGTKLTVLGGGSGGGSEVQLVESGGGLVQPGGSLKLSCAASGFTFNKYAMNWVRQAPGKGLEWVARIRSKYDYKDDDDKADSVKDRFTISRDDSKNTAYLQMNNLKTEDTAVYYCVRHGNFGNSYISYWAYWGQGTLVTVSSGGGGSGGGSEVQLVESGGGLVQPGNSLRLSCAASGFTFSKFGMSWVRQAPGKGLEWVSSISGSGRDTLYAESVKGRFTISRDNAKTTLYLQMNSLRPEDTAVYYCTIGGSLSVSSQGTLVTVSSHHHHHH

SEQ ID NO: 493 - protein, 883 aa, Artificial Sequence
  Description of Artificial Sequence: Synthetic polypeptide
  Pro1117
QVQLVESGGGVVRPGGSLRLSCAASGFTFDDYAMSWIRQAPGKEMEWVSGINWSGTHTRYADSVKGRFTISRDNAKNSLYLQMNSLRAEDTALYYCARGFAADSRSTRGQGTLVTVSSGGGSGGGSEVQLVESGGGLVQPGGSLKLSCAASGFTFNKYAINWVRQAPGKGLEWVARIRSKYNNYATYYADQVKDRFTISRDDSKNTAYLQMNNLKTEDTAVYYCVRHANFGNSYISYWAYWGQGTLVTVSSGGGSGGGSQTVVTQEPSLTVSPGGTVTLTCASSTGAVTSGNYPNWVQQKPGQAPRGLIGGTKFLVPGTPARFSGSLLGGKAALTLSGVQPEDEAEYYCTLWYSNRWVFGGGTKLTVLGGGSGGGSQVQLVESGGGVVRPGGSLRLSCAASGFTFDDYAMSWIRQAPGKEMEWVSGINWSGTHTRYADSVKGRFTISRDNAKNSLYLQMNSLRAEDTALYYCARGFAADSRSTRGQGTLVTVSSSGGPGPAGMKGLPGSQTVVTQEPSLTVSPGGTVTLTCGSSTGAVTSGNYPNWVQQKPGQAPRGLIGDYKDDDDKGTPARFSGSLLGGKAALTLSGVQPEDEAEYYCVLWYSNRWVFGGGTKLTVLGGGSGGGSEVQLVESGGGLVQPGGSLKLSCAASGFTFNKYAMNWVRQAPGKGLEWVARIRSKYDYKDDDDKADSVKDRFTISRDDSKNTAYLQMNNLKTEDTAVYYCVRHGNFGNSYISYWAYWGQGTLVTVSSGGGGSGGGSEVQLVESGGGLVQPGNSLRLSCAASGFTFSKFGMSWVRQAPGKGLEWVSSISGSGRDTLYAESVKGRFTISRDNAKTTLYLQMNSLRPEDTAVYYCTIGGSLSVSSQGTLVTVSSHHHHHH

SEQ ID NO: 494 - protein, 885 aa, Artificial Sequence
  Description of Artificial Sequence: Synthetic polypeptide
  Pro1118
QVQLLESGGGLVQPGGSLRLSCAASRNIGSNYAVGWFRQAPGKEREPVAALRWTGSIIGYDDSLRGRFTISKDNSKNTLYLQMNSLKPEDTAVYYCAARILDRSSYDYWGQGTLVTVSSGGGSGGGSEVQLVESGGGLVQPGGSLKLSCAASGFTFNKYAINWVRQAPGKGLEWVARIRSKYNNYATYYADQVKDRFTISRDDSKNTAYLQMNNLKTEDTAVYYCVRHANFGNSYISYWAYWGQGTLVTVSSGGGSGGGSQTVVTQEPSLTVSPGGTVTLTCASSTGAVTSGNYPNWVQQKPGQAPRGLIGGTKFLVPGTPARFSGSLLGGKAALTLSGVQPEDEAEYYCTLWYSNRWVFGGGTKLTVLGGGSGGGSQVQLLESGGGLVQPGGSLRLSCAASRNIGSNYAVGWFRQAPGKEREPVAALRWTGSIIGYDDSLRGRFTISKDNSKNTLYLQMNSLKPEDTAVYYCAARILDRSSYDYWGQGTLVTVSSSGGPGPAGMKGLPGSQTVVTQEPSLTVSPGGTVTLTCGSSTGAVTSGNYPNWVQQKPGQAPRGLIGDYKDDDDKGTPARFSGSLLGGKAALTLSGVQPEDEAEYYCVLWYSNRWVFGGGTKLTVLGGGSGGGSEVQLVESGGGLVQPGGSLKLSCAASGFTFNKYAMNWVRQAPGKGLEWVARIRSKYDYKDDDDKADSVKDRFTISRDDSKNTAYLQMNNLKTEDTAVYYCVRHGNFGNSYISYWAYWGQGTLVTVSSGGGGSGGGSEVQLVESGGGLVQPGNSLRLSCAASGFTFSKFGMSWVRQAPGKGLEWVSSISGSGRDTLYAESVKGRFTISRDNAKTTLYLQMNSLRPEDTAVYYCTIGGSLSVSSQGTLVTVSSHHHHHH

SEQ ID NO: 495 - protein, 126 aa, Artificial Sequence
  Description of Artificial Sequence: Synthetic polypeptide
  h664
QVQLLESGGGLVQPGGSLRLSCAASGRTLDNYDMGWFRQGPGKEREFVAAISWSGGSTDYAYSVKGRFTISRDNSKNTLYLQMNSLRAEDTAVYYCAADLRFTGGDTMTPETYDYWGQGTLVTVSS

SEQ ID NO: 496 - protein, 10 aa, Artificial Sequence
  Description of Artificial Sequence: Synthetic peptide
  h664 sdCDR1
GRTLDNYDMG

SEQ ID NO: 497 - protein, 17 aa, Artificial Sequence
  Description of Artificial Sequence: Synthetic peptide
  h664 sdCDR2
AISWSGGSTDYAYSVKG

SEQ ID NO: 498 - protein, 17 aa, Artificial Sequence
  Description of Artificial Sequence: Synthetic peptide
  h664 sdCDR3
DLRFTGGDTMTPETYDY

SEQ ID NO: 499 - protein, 118 aa, Artificial Sequence
  Description of Artificial Sequence: Synthetic polypeptide
  h1139
QVQLVESGGGVVRPGGSLRLSCAASGFTFDDYAMSWIRQAPGKEMEWVSGINWSGTHTRYADSVKGRFTISRDNAKNSLYLQMNSLRAEDTALYYCARGFAADSRSTRGQGTLVTVSS

SEQ ID NO: 500 - protein, 10 aa, Artificial Sequence
  Description of Artificial Sequence: Synthetic peptide
  h1139 sdCDR1
GFTFDDYAMS

SEQ ID NO: 501 - protein, 17 aa, Artificial Sequence
  Description of Artificial Sequence: Synthetic peptide
  h1139 sdCDR2
GINWSGTHTRYADSVKG

SEQ ID NO: 502 - protein, 9 aa, Artificial Sequence
  Description of Artificial Sequence: Synthetic peptide
  h1139 sdCDR3
GFAADSRST

SEQ ID NO: 503 - protein, 119 aa, Artificial Sequence
  Description of Artificial Sequence: Synthetic polypeptide
  h1156
QVQLLESGGGLVQPGGSLRLSCAASRNIGSNYAVGWFRQAPGKEREPVAALRWTGSIIGYDDSLRGRFTISKDNSKNTLYLQMNSLKPEDTAVYYCAARILDRSSYDYWGQGTLVTVSS

SEQ ID NO: 504 - protein, 10 aa, Artificial Sequence
  Description of Artificial Sequence: Synthetic peptide
  h1156 sdCDR1
RNIGSNYAVG

SEQ ID NO: 505 - protein, 17 aa, Artificial Sequence
  Description of Artificial Sequence: Synthetic peptide
  h1156 sdCDR2
ALRWTGSIIGYDDSLRG

SEQ ID NO: 506 - protein, 10 aa, Artificial Sequence
  Description of Artificial Sequence: Synthetic peptide
  h1156 sdCDR3
RILDRSSYDY

SEQ ID NO: 507 - protein, 123 aa, Artificial Sequence
  Description of Artificial Sequence: Synthetic polypeptide
  h1159
QVQLLESGGGLVQPGGSLRLSCATSGRTFSSLAMGWFRQAPGKERELVAGISWSGSTTYYADSVKGRFAISRDNSKNTLYLQMNSLRAEDTAVYYCAARTSSIATIGREYDYWGQGTLVTVSS

SEQ ID NO: 508 - protein, 10 aa, Artificial Sequence
  Description of Artificial Sequence: Synthetic peptide
  h1159 sdCDR1
GRTFSSLAMG

SEQ ID NO: 509 - protein, 17 aa, Artificial Sequence
  Description of Artificial Sequence: Synthetic peptide
  h1159 sdCDR2
GISWSGSTTYYADSVKG

SEQ ID NO: 510 - protein, 14 aa, Artificial Sequence
  Description of Artificial Sequence: Synthetic peptide
  h1159 sdCDR3
RTSSIATIGREYDY

SEQ ID NO: 511 - protein, 127 aa, Artificial Sequence
  Description of Artificial Sequence: Synthetic polypeptide
  h1162
QVQLLESGGGLVQPGGSLRLSCAASGRPFSGNAMGWFRQAPGKEREFVAAISWSGDSTYYADSVKGRFTISRDNSKNTLYLQMNSLRAEDTAVYYCAATRSFYSRTYYTRPSDYNYWGPGTLVTVSS

SEQ ID NO: 512 - protein, 10 aa, Artificial Sequence
  Description of Artificial Sequence: Synthetic peptide
  h1162 sdCDR1
GRPFSGNAMG

SEQ ID NO: 513 - protein, 17 aa, Artificial Sequence
  Description of Artificial Sequence: Synthetic peptide
  h1162 sdCDR2
AISWSGDSTYYADSVKG

SEQ ID NO: 514 - protein, 18 aa, Artificial Sequence
  Description of Artificial Sequence: Synthetic peptide
  h1162 sdCDR3
TRSFYSRTYYTRPSDYNY

SEQ ID NO: 515 - protein, 5 aa, Artificial Sequence
  Description of Artificial Sequence: Synthetic peptide
  AA157-161
LALTL

SEQ ID NO: 516 - protein, 5 aa, Artificial Sequence
  Description of Artificial Sequence: Synthetic peptide
  AA194-198
TRTVC

SEQ ID NO: 517 - protein, 12 aa, Artificial Sequence
  Description of Artificial Sequence: Synthetic peptide
  AA462-472
QLTFRNPHQALL

SEQ ID NO: 518 - protein, 40 aa, Artificial Sequence
  Description of Artificial Sequence: Synthetic polypeptide
  SITE (1)..(40): This sequence may encompass 1-10 "Gly Gly Gly Ser" repeating units
GGGSGGGSGGGSGGGSGGGSGGGSGGGSGGGSGGGSGGGS

SEQ ID NO: 519 - protein, 40 aa, Artificial Sequence
  Description of Artificial Sequence: Synthetic polypeptide
  SITE (1)..(40): This sequence may encompass 1-10 "Gly Gly Ser Gly" repeating units
GGSGGGSGGGSGGGSGGGSGGGSGGGSGGGSGGGSGGGSG

SEQ ID NO: 520 - protein, 50 aa, Artificial Sequence
  Description of Artificial Sequence: Synthetic polypeptide
  SITE (1)..(50): This sequence may encompass 1-10 "Gly Gly Ser Gly Gly" repeating units
GGSGGGGSGGGGSGGGGSGGGGSGGGGSGGGGSGGGGSGGGGSGGGGSGG

SEQ ID NO: 521 - protein, 50 aa, Artificial Sequence
  Description of Artificial Sequence: Synthetic polypeptide
  SITE (1)..(50): This sequence may encompass 1-10 "Gly Gly Gly Gly Ser" repeating units
GGGGSGGGGSGGGGSGGGGSGGGGSGGGGSGGGGSGGGGSGGGGSGGGGS

SEQ ID NO: 522 - protein, 893 aa, Artificial Sequence; identical to SEQ ID NO: 452
  Description of Artificial Sequence: Synthetic polypeptide
  Pro601

SEQ ID NO: 523 - protein, 889 aa, Artificial Sequence
  Description of Artificial Sequence: Synthetic polypeptide
  Pro602
QVQLQESGGGLVQPGGSLRLSCEASPRTFSTYSMAWFRQAPGKERSFVAAINWSGGNTSYADSVKGRFTISRDNSKNTLYLQMNSLRAEDTAVYYCAAGGVLAHHNYEYDYWGQGTLVTVSSGGGSGGGSEVQLVESGGGLVQPGGSLKLSCAASGFTFNKYAINWVRQAPGKGLEWVARIRSKYNNYATYYADQVKDRFTISRDDSKNTAYLQMNNLKTEDTAVYYCVRHANFGNSYISYWAYWGQGTLVTVSSGGGSGGGSQTVVTQEPSLTVSPGGTVTLTCASSTGAVTSGNYPNWVQQKPGQAPRGLIGGTKFLVPGTPARFSGSLLGGKAALTLSGVQPEDEAEYYCTLWYSNRWVFGGGTKLTVLGGGSGGGSQVQLQESGGGLVQPGGSLRLSCEASPRTFSTYSMAWFRQAPGKERSFVAAINWSGGNTSYADSVKGRFTISRDNSKNTLYLQMNSLRAEDTAVYYCAAGGVLAHHNYEYDYWGQGTLVTVSSSGGPGPAGMKGLPGSQTVVTQEPSLTVSPGGTVTLTCGSSTGAVTSGNYPNWVQQKPGQAPRGLIGGTKDDAPGTPARFSGSLLGGKAALTLSGVQPEDEAEYYCVLWYSNRWVFGGGTKLTVLGGGSGGGSEVQLVESGGGLVQPGGSLKLSCAASGFTFNKHAMNWVRQAPGKGLEWVARIRSKYNNYATAYADSVKDRFTISRDDSKNTAYLQMNNLKTEDTAVYYCVRHGNFGNSYISYWAYWGQGTLVTVSSGGGGSGGGSEVQLVESGGGLVQPGNSLRLSCAASGFTFSKFGMSWVRQAPGKGLEWVSSISGSGRDTLYAESVKGRFTISRDNAKTTLYLQMNSLRPEDTAVYYCTIGGSLSVSSQGTLVTVSSHHHHHH

SEQ ID NO: 524 - protein, 891 aa, Artificial Sequence
  Description of Artificial Sequence: Synthetic polypeptide
  V3
QVQLQESGGGLVQPGGSLRLSCAPSRRTFHTYHMGWFRQAPGKEREFVAVINWSGGSTVYADSVKGRFTISRDNSKNTLYLQMNSLRAEDTAVYYCAAGGATTQRATEASYDYWGQGTLVTVSSGGGSGGGSEVQLVESGGGLVQPGGSLKLSCAASGFTFNKYAINWVRQAPGKGLEWVARIRSKYNNYATYYADQVKDRFTISRDDSKNTAYLQMNNLKTEDTAVYYCVRHANFGNSYISYWAYWGQGTLVTVSSGGGSGGGSQTVVTQEPSLTVSPGGTVTLTCASSTGAVTSGNYPNWVQQKPGQAPRGLIGGTKFLVPGTPARFSGSLLGGKAALTLSGVQPEDEAEYYCTLWYSNRWVFGGGTKLTVLGGGSGGGSQVQLQESGGGLVQPGGSLRLSCEASPRTFSTYSMAWFRQAPGKERSFVAAINWSGGNTSYADSVKGRFTISRDNSKNTLYLQMNSLRAEDTAVYYCAAGGVLAHHNYEYDYWGQGTLVTVSSSGGPGPAGMKGLPGSQTVVTQEPSLTVSPGGTVTLTCGSSTGAVTSGNYPNWVQQKPGQAPRGLIGGTKDDAPGTPARFSGSLLGGKAALTLSGVQPEDEAEYYCVLWYSNRWVFGGGTKLTVLGGGSGGGSEVQLVESGGGLVQPGGSLKLSCAASGFTFNKHAMNWVRQAPGKGLEWVARIRSKYNNYATAYADSVKDRFTISRDDSKNTAYLQMNNLKTEDTAVYYCVRHGNFGNSYISYWAYWGQGTLVTVSSGGGGSGGGSEVQLVESGGGLVQPGNSLRLSCAASGFTFSKFGMSWVRQAPGKGLEWVSSISGSGRDTLYAESVKGRFTISRDNAKTTLYLQMNSLRPEDTAVYYCTIGGSLSVSSQGTLVTVSSHHHHHH

SEQ ID NO: 525 - protein, 891 aa, Artificial Sequence
  Description of Artificial Sequence: Synthetic polypeptide
  V4
QVQLQESGGGLVQPGGSLRLSCEASPRTFSTYSMAWFRQAPGKERSFVAAINWSGGNTSYADSVKGRFTISRDNSKNTLYLQMNSLRAEDTAVYYCAAGGVLAHHNYEYDYWGQGTLVTVSSGGGSGGGSEVQLVESGGGLVQPGGSLKLSCAASGFTFNKYAINWVRQAPGKGLEWVARIRSKYNNYATYYADQVKDRFTISRDDSKNTAYLQMNNLKTEDTAVYYCVRHANFGNSYISYWAYWGQGTLVTVSSGGGSGGGSQTVVTQEPSLTVSPGGTVTLTCASSTGAVTSGNYPNWVQQKPGQAPRGLIGGTKFLVPGTPARFSGSLLGGKAALTLSGVQPEDEAEYYCTLWYSNRWVFGGGTKLTVLGGGSGGGSQVQLQESGGGLVQPGGSLRLSCAPSRRTFHTYHMGWFRQAPGKEREFVAVINWSGGSTVYADSVKGRFTISRDNSKNTLYLQMNSLRAEDTAVYYCAAGGATTQRATEASYDYWGQGTLVTVSSSGGPGPAGMKGLPGSQTVVTQEPSLTVSPGGTVTLTCGSSTGAVTSGNYPNWVQQKPGQAPRGLIGGTKDDAPGTPARFSGSLLGGKAALTLSGVQPEDEAEYYCVLWYSNRWVFGGGTKLTVLGGGSGGGSEVQLVESGGGLVQPGGSLKLSCAASGFTFNKHAMNWVRQAPGKGLEWVARIRSKYNNYATAYADSVKDRFTISRDDSKNTAYLQMNNLKTEDTAVYYCVRHGNFGNSYISYWAYWGQGTLVTVSSGGGGSGGGSEVQLVESGGGLVQPGNSLRLSCAASGFTFSKFGMSWVRQAPGKGLEWVSSISGSGRDTLYAESVKGRFTISRDNAKTTLYLQMNSLRPEDTAVYYCTIGGSLSVSSQGTLVTVSSHHHHHH

SEQ ID NO: 526 - protein, 891 aa, Artificial Sequence
  Description of Artificial Sequence: Synthetic polypeptide
  Pro664
QVQLQESGGGLVQPGGSLRLSCEASPRTFSTYSMAWFRQAPGKERSFVAAINWSGGNTYYADSVKGRFTISRDNSKNTLYLQMNSLRAEDTAVYYCAAGGVLAHHNYEYDYWGQGTLVTVSSGGGSGGGSEVQLVESGGGLVQPGGSLKLSCAASGFTFNKYAINWVRQAPGKGLEWVARIRSKYNNYATYYADQVKDRFTISRDDSKNTAYLQMNNLKTEDTAVYYCVRHANFGNSYISYWAYWGQGTLVTVSSGGGSGGGSQTVVTQEPSLTVSPGGTVTLTCASSTGAVTSGNYPNWVQQKPGQAPRGLIGGTKFLVPGTPARFSGSLLGGKAALTLSGVQPEDEAEYYCTLWYSNRWVFGGGTKLTVLGGGSGGGSQVQLQESGGGLVQPGGSLRLSCEASPRTFSTYSMAWFRQAPGKERSFVAAINWSGGNTYYADSVKGRFTISRDNSKNTLYLQMNSLRAEDTAVYYCAAGGVLAHHNYEYDYWGQGTLVTVSSSGGPGPAGMKGLPGSQTVVTQEPSLTVSPGGTVTLTCGSSTGAVTSGNYPNWVQQKPGQAPRGLIGDYKDDDDKGTPARFSGSLLGGKAALTLSGVQPEDEAEYYCVLWYSNRWVFGGGTKLTVLGGGSGGGSEVQLVESGGGLVQPGGSLKLSCAASGFTFNKYAMNWVRQAPGKGLEWVARIRSKYDYKDDDDKADSVKDRFTISRDDSKNTAYLQMNNLKTEDTAVYYCVRHGNFGNSYISYWAYWGQGTLVTVSSGGGGSGGGSEVQLVESGGGLVQPGNSLRLSCAASGFTFSKFGMSWVRQAPGKGLEWVSSISGSGRDTLYAESVKGRFTISRDNAKTTLYLQMNSLRPEDTAVYYCTIGGSLSVSSQGTLVTVSSHHHHHH

SEQ ID NO: 527 - protein, 891 aa, Artificial Sequence
  Description of Artificial Sequence: Synthetic polypeptide
  Pro665
QVQLQESGGGLVQPGGSLRLSCEASPRTFSTYSMAWFRQAPGKERSFVAAINWSGGQTSYADSVKGRFTISRDNSKNTLYLQMNSLRAEDTAVYYCAAGGVLAHHNYEYDYWGQGTLVTVSSGGGSGGGSEVQLVESGGGLVQPGGSLKLSCAASGFTFNKYAINWVRQAPGKGLEWVARIRSKYNNYATYYADQVKDRFTISRDDSKNTAYLQMNNLKTEDTAVYYCVRHANFGNSYISYWAYWGQGTLVTVSSGGGSGGGSQTVVTQEPSLTVSPGGTVTLTCASSTGAVTSGNYPNWVQQKPGQAPRGLIGGTKFLVPGTPARFSGSLLGGKAALTLSGVQPEDEAEYYCTLWYSNRWVFGGGTKLTVLGGGSGGGSQVQLQESGGGLVQPGGSLRLSCEASPRTFSTYSMAWFRQAPGKERSFVAAINWSGGQTSYADSVKGRFTISRDNSKNTLYLQMNSLRAEDTAVYYCAAGGVLAHHNYEYDYWGQGTLVTVSSSGGPGPAGMKGLPGSQTVVTQEPSLTVSPGGTVTLTCGSSTGAVTSGNYPNWVQQKPGQAPRGLIGDYKDDDDKGTPARFSGSLLGGKAALTLSGVQPEDEAEYYCVLWYSNRWVFGGGTKLTVLGGGSGGGSEVQLVESGGGLVQPGGSLKLSCAASGFTFNKYAMNWVRQAPGKGLEWVARIRSKYDYKDDDDKADSVKDRFTISRDDSKNTAYLQMNNLKTEDTAVYYCVRHGNFGNSYISYWAYWGQGTLVTVSSGGGGSGGGSEVQLVESGGGLVQPGNSLRLSCAASGFTFSKFGMSWVRQAPGKGLEWVSSISGSGRDTLYAESVKGRFTISRDNAKTTLYLQMNSLRPEDTAVYYCTIGGSLSVSSQGTLVTVSSHHHHHH

SEQ ID NO: 528 - protein, 891 aa, Artificial Sequence
  Description of Artificial Sequence: Synthetic polypeptide
  Pro667
QVQLQESGGGLVQPGGSLRLSCEASPRTFSTYSMAWFRQAPGKERSFVAAINWSGGETSYADSVKGRFTISRDNSKNTLYLQMNSLRAEDTAVYYCAAGGVLAHHNYEYDYWGQGTLVTVSSGGGSGGGSEVQLVESGGGLVQPGGSLKLSCAASGFTFNKYAINWVRQAPGKGLEWVARIRSKYNNYATYYADQVKDRFTISRDDSKNTAYLQMNNLKTEDTAVYYCVRHANFGNSYISYWAYWGQGTLVTVSSGGGSGGGSQTVVTQEPSLTVSPGGTVTLTCASSTGAVTSGNYPNWVQQKPGQAPRGLIGGTKFLVPGTPARFSGSLLGGKAALTLSGVQPEDEAEYYCTLWYSNRWVFGGGTKLTVLGGGSGGGSQVQLQESGGGLVQPGGSLRLSCEASPRTFSTYSMAWFRQAPGKERSFVAAINWSGGETSYADSVKGRFTISRDNSKNTLYLQMNSLRAEDTAVYYCAAGGVLAHHNYEYDYWGQGTLVTVSSSGGPGPAGMKGLPGSQTVVTQEPSLTVSPGGTVTLTCGSSTGAVTSGNYPNWVQQKPGQAPRGLIGDYKDDDDKGTPARFSGSLLGGKAALTLSGVQPEDEAEYYCVLWYSNRWVFGGGTKLTVLGGGSGGGSEVQLVESGGGLVQPGGSLKLSCAASGFTFNKYAMNWVRQAPGKGLEWVARIRSKYDYKDDDDKADSVKDRFTISRDDSKNTAYLQMNNLKTEDTAVYYCVRHGNFGNSYISYWAYWGQGTLVTVSSGGGGSGGGSEVQLVESGGGLVQPGNSLRLSCAASGFTFSKFGMSWVRQAPGKGLEWVSSISGSGRDTLYAESVKGRFTISRDNAKTTLYLQMNSLRPEDTAVYYCTIGGSLSVSSQGTLVTVSSHHHHHH

SEQ ID NO: 529 - protein, 891 aa, Artificial Sequence
  Description of Artificial Sequence: Synthetic polypeptide
  Pro694
QVQLQESGGGLVQPGGSLRLSCEASPRTFSTYSMAWFRQAPGKERSFVAAINWSGGNTAYADSVKGRFTISRDNSKNTLYLQMNSLRAEDTAVYYCAAGGVLAHHNYEYDYWGQGTLVTVSSGGGSGGGSEVQLVESGGGLVQPGGSLKLSCAASGFTFNKYAINWVRQAPGKGLEWVARIRSKYNNYATYYADQVKDRFTISRDDSKNTAYLQMNNLKTEDTAVYYCVRHANFGNSYISYWAYWGQGTLVTVSSGGGSGGGSQTVVTQEPSLTVSPGGTVTLTCASSTGAVTSGNYPNWVQQKPGQAPRGLIGGTKFLVPGTPARFSGSLLGGKAALTLSGVQPEDEAEYYCTLWYSNRWVFGGGTKLTVLGGGSGGGSQVQLQESGGGLVQPGGSLRLSCEASPRTFSTYSMAWFRQAPGKERSFVAAINWSGGNTAYADSVKGRFTISRDNSKNTLYLQMNSLRAEDTAVYYCAAGGVLAHHNYEYDYWGQGTLVTVSSSGGPGPAGMKGLPGSQTVVTQEPSLTVSPGGTVTLTCGSSTGAVTSGNYPNWVQQKPGQAPRGLIGDYKDDDDKGTPARFSGSLLGGKAALTLSGVQPEDEAEYYCVLWYSNRWVFGGGTKLTVLGGGSGGGSEVQLVESGGGLVQPGGSLKLSCAASGFTFNKYAMNWVRQAPGKGLEWVARIRSKYDYKDDDDKADSVKDRFTISRDDSKNTAYLQMNNLKTEDTAVYYCVRHGNFGNSYISYWAYWGQGTLVTVSSGGGGSGGGSEVQLVESGGGLVQPGNSLRLSCAASGFTFSKFGMSWVRQAPGKGLEWVSSISGSGRDTLYAESVKGRFTISRDNAKTTLYLQMNSLRPEDTAVYYCTIGGSLSVSSQGTLVTVSSHHHHHH

SEQ ID NO: 530 - protein, 891 aa, Artificial Sequence
  Description of Artificial Sequence: Synthetic polypeptide
  Pro695
QVQLQESGGGLVQPGGSLRLSCEASPRTFSTYSMAWFRQAPGKERSFVAAINWSGGDTSYADSVKGRFTISRDNSKNTLYLQMNSLRAEDTAVYYCAAGGVLAHHNYEYDYWGQGTLVTVSSGGGSGGGSEVQLVESGGGLVQPGGSLKLSCAASGFTFNKYAINWVRQAPGKGLEWVARIRSKYNNYATYYADQVKDRFTISRDDSKNTAYLQMNNLKTEDTAVYYCVRHANFGNSYISYWAYWGQGTLVTVSSGGGSGGGSQTVVTQEPSLTVSPGGTVTLTCASSTGAVTSGNYPNWVQQKPGQAPRGLIGGTKFLVPGTPARFSGSLLGGKAALTLSGVQPEDEAEYYCTLWYSNRWVFGGGTKLTVLGGGSGGGSQVQLQESGGGLVQPGGSLRLSCEASPRTFSTYSMAWFRQAPGKERSFVAAINWSGGDTSYADSVKGRFTISRDNSKNTLYLQMNSLRAEDTAVYYCAAGGVLAHHNYEYDYWGQGTLVTVSSSGGPGPAGMKGLPGSQTVVTQEPSLTVSPGGTVTLTCGSSTGAVTSGNYPNWVQQKPGQAPRGLIGDYKDDDDKGTPARFSGSLLGGKAALTLSGVQPEDEAEYYCVLWYSNRWVFGGGTKLTVLGGGSGGGSEVQLVESGGGLVQPGGSLKLSCAASGFTFNKYAMNWVRQAPGKGLEWVARIRSKYDYKDDDDKADSVKDRFTISRDDSKNTAYLQMNNLKTEDTAVYYCVRHGNFGNSYISYWAYWGQGTLVTVSSGGGGSGGGSEVQLVESGGGLVQPGNSLRLSCAASGFTFSKFGMSWVRQAPGKGLEWVSSISGSGRDTLYAESVKGRFTISRDNAKTTLYLQMNSLRPEDTAVYYCTIGGSLSVSSQGTLVTVSSHHHHHH

SEQ ID NO: 531 - protein, 891 aa, Artificial Sequence
  Description of Artificial Sequence: Synthetic polypeptide
  Pro766
QVQLQESGGGLVQPGGSLRLSCEASPRTFSTYSMAWFRQAPGKERSFVAAINWSGGNTYYADSVKGRFTISRDNSKNTLYLQMNSLRAEDTAVYYCAAGGVLAHHNYEYDYWGQGTLVTVSSGGGSGGGSEVQLVESGGGLVQPGGSLKLSCAASGFTFNKYAINWVRQAPGKGLEWVARIRSKYNNYATYYADQVKDRFTISRDDSKNTAYLQMNNLKTEDTAVYYCVRHANFGNSYISYWAYWGQGTLVTVSSGGGSGGGSQTVVTQEPSLTVSPGGTVTLTCASSTGAVTSGNYPNWVQQKPGQAPRGLIGGTKFLVPGTPARFSGSLLGGKAALTLSGVQPEDEAEYYCTLWYSNRWVFGGGTKLTVLGGGSGGGSQVQLQESGGGLVQPGGSLRLSCEASPRTFSTYSMAWFRQAPGKERSFVAAINWSGGNTYYADSVKGRFTISRDNSKNTLYLQMNSLRAEDTAVYYCAAGGVLAHHNYEYDYWGQGTLVTVSSGGGGSGGGGSGGGGSQTVVTQEPSLTVSPGGTVTLTCGSSTGAVTSGNYPNWVQQKPGQAPRGLIGDYKDDDDKGTPARFSGSLLGGKAALTLSGVQPEDEAEYYCVLWYSNRWVFGGGTKLTVLGGGSGGGSEVQLVESGGGLVQPGGSLKLSCAASGFTFNKYAMNWVRQAPGKGLEWVARIRSKYDYKDDDDKADSVKDRFTISRDDSKNTAYLQMNNLKTEDTAVYYCVRHGNFGNSYISYWAYWGQGTLVTVSSGGGGSGGGSEVQLVESGGGLVQPGNSLRLSCAASGFTFSKFGMSWVRQAPGKGLEWVSSISGSGRDTLYAESVKGRFTISRDNAKTTLYLQMNSLRPEDTAVYYCTIGGSLSVSSQGTLVTVSSHHHHHH

SEQ ID NO: 532 - protein, 6 aa, Artificial Sequence
  Description of Artificial Sequence: Synthetic peptide
  MMP
PLGLAG

SEQ ID NO: 533 - protein, 6 aa, Artificial Sequence
  Description of Artificial Sequence: Synthetic peptide
  MMP
  MOD_RES (6)..(6): Any amino acid
PLGLAX

SEQ ID NO: 534 - protein, 6 aa, Artificial Sequence
  Description of Artificial Sequence: Synthetic peptide
  MMP
  MOD_RES (4)..(4): Cys(Me)
PLGCAG

SEQ ID NO: 535 - protein, 8 aa, Artificial Sequence
  Description of Artificial Sequence: Synthetic peptide
  MMP
ESPAYYTA
